(19) United States
(12) Patent Application Publication
(10) Pub. No.: US 2024/0310380 A1
(43) Pub. Date: Sep. 19, 2024

(54) EXON 1 FRAMESHIFT ANTIGENS FOR VACCINES, THERAPEUTICS, AND DIAGNOSTICS

(71) Applicant: Arizona Board of Regents on behalf of Arizona State University, Scottsdale, AZ (US)

(72) Inventor: Stephen Albert Johnston, Tempe, AZ (US)

(21) Appl. No.: 18/678,311

(22) Filed: May 30, 2024

Related U.S. Application Data
(63) Continuation of application No. PCT/US2022/081027, filed on Dec. 6, 2022.
(60) Provisional application No. 63/287,422, filed on Dec. 8, 2021.

(51) Int. Cl. G01N 33/574; A61K 39/00

(52) U.S. Cl. CPC G01N 33/57488; A61K 39/0011; A61K 2039/585

(57) ABSTRACT

Provided herein are methods of identifying neoantigens for diagnosing, treating, and preventing cancer. Also provided herein are methods of measuring antibody response to one or more frameshift peptides caused by exon 1 mis-initiation. Also disclosed are methods and compositions for administering identified neoantigens for the treatment and prevention of cancer.

### INCORPORATION BY REFERENCE TO ANY PRIORITY APPLICATIONS

[0001] The present application is a continuation of PCT Application No. PCT/US2022/081027, filed Dec. 6, 2022, which claims the benefit of U.S. Provisional Patent Application Ser. No. 63/287,422, filed Dec. 8, 2021, each of which is incorporated herein by reference in its entirety.

### REFERENCE TO SEQUENCE LISTING

[0002] The present application is being filed along with a sequence listing in electronic format. The sequence listing is provided as a file entitled “SEQLISTING_CALV034C1.xml”, created May 29, 2024, which is 16.7 MB in size. The information in the electronic format of the sequence listing is incorporated herein by reference in its entirety.

### BACKGROUND

[0003] Checkpoint inhibitor immunotherapeutics are revolutionizing cancer therapy. However, even in the most responsive cancers a substantial portion (50%-80%) of the patients have poor to no positive response. The evidence to date is that whether a patient has an effective response to the treatment depends on the nature of the immune response they have established against the tumor. More specifically, the level and quality of the immune response to neoantigens in the cancer seems to be most important.

### SUMMARY

[0004] Provided herein, in certain aspects, are arrays and compositions, and methods of making and using the arrays and compositions for diagnostic, preventative and therapeutic purposes.

[0005] Accordingly, some embodiments provided herein are arrays. In some embodiments, the arrays include frameshift peptides (FSPs) resulting from exon 1 mis-initiation of translation. In some embodiments, the FSPs on the array are spaced between 3 and 9 μm, such as 3, 4, 5, 6, 7, 8, or 9 μm, or an amount within a range defined by any two of the aforementioned values. In some embodiments, the array is used to diagnose cancer. In some embodiments, the arrays are used to predict response to immunotherapy. In some embodiments, the arrays are used to predict adverse responses to immunotherapy. In some embodiments, the FSPs are used to design therapeutic or prophylactic vaccines. In some embodiments, the FSPs comprise one or more peptides as set forth in SEQ ID NOs: 1-19,997. In some embodiments, the arrays include at least about 2500, about 5000, about 7500, about 10000, about 12500, about 15000, about 17500, about 20000, about 22500, about 25000, about 27500, about 30000, about 32500, about 35000, about 37500, about 40000, about 50000, about 100000, about 200000, about 300000, or about 400000 FSPs, or an amount within a range defined by any two of the aforementioned values.

[0006] Some embodiments provided herein relate to vaccine compositions. In some embodiments, biological samples, such as blood, from cancer patients are applied to the FSP arrays described herein to determine reactivity of peptides for each patient. In some embodiments, FSPs unique to the patient are used in a personal vaccine. In some embodiments, FSPs shared between different patients are used for off-the-shelf therapeutic or preventative vaccines. In some embodiments, the vaccine compositions include frameshift peptides (FSPs) resulting from exon 1 mis-initiation of translation. In some embodiments, the vaccine compositions further include an adjuvant. In some embodiments, the adjuvant is ABM2, AS01B, AS02, AS02A, Adjumer, Adjuvax, Algammulin, Alum, Aluminum phosphate, Aluminum potassium sulfate, Bordetella pertussis, Calcitriol, Chitosan, Cholera toxin, CpG, Dibutyl phthalate, Dimethyldioctadecylammonium bromide (DDA), Freund's adjuvant, Freund's complete, Freund's incomplete (IFA), GM-CSF, GMDP, Gamma Inulin, Glycerol, HBSS (Hank's Balanced Salt Solution), polyinosinic-polycytidylic acid stabilized with polylysine and carboxymethylcellulose (poly-ICLC, also known as Hiltonol), IL-12, IL-2, Imiquimod, Interferon-Gamma, ISCOM, Lipid Core Peptide (LCP), Lipofectin, Lipopolysaccharide (LPS), Liposomes, MF59, MLP+TDM, Monophosphoryl lipid A, Montanide IMS-1313, Montanide ISA 206, Montanide ISA 720, Montanide ISA-51, Montanide ISA-50, nor-MDP, Oil-in-water emulsion, P1005 (non-ionic copolymer), Pam3Cys (lipoprotein), Pertussis toxin, Poloxamer, QS21, RaLPS, Ribi, Saponin, Seppic ISA 720, Soybean Oil, Squalene, Syntex Adjuvant Formulation (SAF), Synthetic polynucleotides (poly IC/poly AU), TiterMax Tomatine, Vaxfectin, XtendIII, or Zymosan.

[0007] Some embodiments provided herein relate to methods of detecting cancer in a subject. In some embodiments, the methods include contacting a biological sample from the subject to an array comprising frameshift peptides (FSPs) resulting from exon 1 mis-initiation of translation and measuring antibody reactivity to the FSPs resulting from mis-initiation of translation in tumors. In some embodiments, the FSPs comprise one or more peptides as set forth in SEQ ID NOs: 1-19,997. In some embodiments, the FSPs are fixed on a substrate. In some embodiments, the substrate comprises glass, silica, composite, resin, or combination thereof. In some embodiments, the array is configured to detect binding by at least one of fluorescence, luminescence, calorimetry, chromatography, radioactivity, Bio-Layer Interferometry, and surface plasmon resonance. In some embodiments, the array comprises at least about 2500, about 5000, about 7500, about 10000, about 12500, about 15000, about 17500, about 20000, about 22500, about 25000, about 27500, about 30000, about 32500, about 35000, about 37500, about 40000, about 50000, about 100000, about 200000, about 300000, or about 400000 FSPs, or an amount within a range defined by any two of the aforementioned values. In some embodiments, the biological sample comprises blood, serum, plasma, cerebrospinal fluid, saliva, urine, or combinations thereof. In some embodiments, the biological sample comprises an antibody. In some embodiments, the subject is a mammal. In some embodiments, the subject is a human, a dog, a cat, a mouse, a rat, a rabbit, a horse, a cow, or a pig. In some embodiments, the subject is suspected of having a cancer. In some embodiments, the cancer is selected from the group consisting of Acute lymphoblastic leukemia, Acute monocytic leukemia, Acute myeloid leukemia, Acute promyelocytic leukemia, Adenocarcinoma, Adult T-cell leukemia, Astrocytoma, Bladder cancer, Bone Cancer, Brain Tumor, Breast Cancer, Burkitt's lymphoma, Carcinoma, Cervical Cancer, Chronic Lymphocytic Leukemia, Chronic myelogenous leukemia, Colon Cancer, Colorectal cancer, Endometrial cancer, Glioblastoma multiforme, Glioma, Hepatocellular carcinoma, Hodgkin's lymphoma, Inflammatory breast cancer, Kidney Cancer, Leukemia, Lung cancer, Lymphoma, Malignant Mesothelioma, Medulloblastoma, Melanoma, Multiple myeloma, Neuroblastoma, Non-Hodgkin Lymphoma, Non-Small Cell Lung Cancer, Ovarian Cancer, Pancreatic Cancer, Pituitary tumor, Prostate cancer, Retinoblastoma, Skin Cancer, Small Cell Lung Cancer, Squamous cell carcinoma, Stomach cancer, T-cell leukemia, T-cell lymphoma, Thyroid cancer, and Wilms' tumor.

[0008] Some embodiments provided herein relate to methods of treating or preventing cancer. In some embodiments, the methods include administering a therapeutic molecule designed to bind frameshift peptides (FSPs) resulting from exon 1 mis-initiation of translation. In some embodiments, the therapeutic molecule is an antibody or synthetic antibody. In some embodiments, the therapeutic molecule binds a FSP resulting from exon 1 mis-initiation of translation. In some embodiments, the therapeutic molecule is a vaccine. In some embodiments, the vaccine comprises FSPs resulting from exon 1 mis-initiation of translation. In some embodiments, the FSPs comprise one or more peptides as set forth in SEQ ID NOs: 1-19,997.

[0009] Some embodiments provided herein relate to methods of predicting response to an immunotherapy. In some embodiments, the methods include identifying frameshift peptides (FSPs) resulting from exon 1 mis-initiation of translation. In some embodiments, the methods are used to predict adverse immune responses to immunotherapy.

### BRIEF DESCRIPTION OF THE DRAWINGS

[0010] The novel features of the disclosure are set forth with particularity in the appended claims. A better understanding of the features and advantages of the present disclosure will be obtained by reference to the following detailed description that sets forth illustrative embodiments, in which the principles of the disclosure are utilized, and the accompanying drawings of which:

[0011] FIG. 1: shows a model for RNA based frame-shift peptide (FSP) production in normal cells versus cancer cells.

[0012] FIG. 2: shows a model of normal initiation versus mis-initiation at exon 1, creating FSPs.

[0013] FIG. 3: shows how FSPs predicted to be produced by mis-initiation of translation of exon 1 can be screened for those with clinical utility for vaccines, therapeutics, or diagnostics.

[0014] FIG. 4A: shows common reactivity and cancer-type reactivity against FS peptides were represented by ˜7000 selected FS peptides. PC: pancreatic cancer; LC: lung cancer; GBM: glioblastoma; GC: gastric cancer; and BC: breast cancer; (n=17/each cancer type) and a set of non-cancer samples (n=64), as control. A subset of these peptides is from exon 1 mis-initiations.

[0015] FIG. 4B: shows p-value and fold change volcano plot analysis of cancer IgG reactivity on the 400K FS array compared to normal. The horizontal line represents the significant p-value cut-off= 1/392328 (the number of the array peptides). A subset of these significant peptides is from exon 1 mis-initiations.

[0016] FIG. 4C: shows a distribution of personal anti-FS response and shared anti-FS response in all 5 cancer types. A subset of these significant peptides is from exon 1 mis-initiations.

[0017] FIG. 4D: shows components of cancer-type specific FS vaccines, top 100 FS peptides for each cancer type were selected with highest positive rate in corresponding cancer type. Shading in normal represents a negative sample; other shading is indicative of a positive sample. A subset of these significant peptides is from exon 1 mis-initiations.

[0018] FIG. 4E: shows components of a general FS vaccine, top 100 FS peptides were selected with highest positive rate in cancer group. Shading in normal represents a negative sample; other shading is indicative of a positive sample. A subset of these significant peptides is from exon 1 mis-initiations.

[0019] FIG. 4F: shows a heat map of the positive rate distribution of the FS peptides in Stage I and late stages pancreatic cancer. A subset of these significant peptides is from exon 1 mis-initiations.

[0020] FIG. 5: shows that exon 1 FSPs are useful in diagnosing stage 1 breast cancer and in creating a potential vaccine for breast cancer.

[0021] FIG. 6: shows that exon 1 FSPs are predictive of a subject's response to immunotherapeutic treatment of lung cancer. Shown are the performance results of a model using 226 FSPs, 32 of these were FSPs derived from exon 1 mis-initiation errors. which shows performance of the response to treatment model compared to observed response outcomes. The ordered-scores map displays observed or predicted non-progressors (bottom) and observed or predicted progressors (top). Within the 226-peptide classifying model, 32 peptides were generated from exon 1 mis-initiations.

### DETAILED DESCRIPTION

[0022] Throughout the description, including in the Summary and Drawings, reference is made to particular features of the disclosure. It is to be understood that the disclosure in this specification includes all possible combinations of such particular features. For example, where a particular feature is disclosed in the context of a particular aspect or embodiment of the disclosure, or a particular claim, that feature can also be used, to the extent possible, in combination with and/or in the context of other particular aspects and embodiments of the disclosure, and in the disclosure generally.

[0023] Unless defined otherwise, all technical and scientific terms used herein have the same meaning as is commonly understood by one of ordinary skill in the art. All patents, applications, published applications and other publications referenced herein are incorporated by reference in their entirety unless stated otherwise. In the event that there is a plurality of definitions for a term herein, those in this section prevail unless stated otherwise.

[0024] Terms and phrases used in this application, and variations thereof, especially in the appended claims, unless otherwise expressly stated, should be construed as open ended as opposed to limiting. As examples of the foregoing, the term ‘including’ should be read to mean ‘including, without limitation,’ ‘including but not limited to,’ or the like; the term ‘comprising’ as used herein is synonymous with ‘including,’ ‘containing,’ or ‘characterized by,’ and is inclusive or open-ended and does not exclude additional, unrecited elements or method steps; the term ‘having’ should be interpreted as ‘having at least;’ the term ‘includes’ should be interpreted as ‘includes but is not limited to;’ the term ‘example’ is used to provide exemplary instances of the item in discussion, not an exhaustive or limiting list thereof; and use of terms like ‘preferably,’ ‘preferred,’ ‘desired,’ or ‘desirable,’ and words of similar meaning should not be understood as implying that certain features are critical, essential, or even important to the structure or function, but instead as merely intended to highlight alternative or additional features that may or may not be utilized in a particular embodiment. In addition, the term “comprising” is to be interpreted synonymously with the phrases “having at least” or “including at least.” When used in the context of a process, the term “comprising” means that the process includes at least the recited steps but may include additional steps. When used in the context of a compound, composition or device, the term “comprising” means that the compound, composition, or device includes at least the recited features or components, but may also include additional features or components. Likewise, a group of items linked with the conjunction ‘and’ should not be read as requiring that each and every one of those items be present in the grouping, but rather should be read as ‘and/or’ unless expressly stated otherwise. Similarly, a group of items linked with the conjunction ‘or’ should not be read as requiring mutual exclusivity among that group, but rather should be read as ‘and/or’ unless expressly stated otherwise.

[0025] By “about” is meant a quantity, level, value, number, frequency, percentage, dimension, size, amount, weight or length that varies by as much as 30, 25, 20, 15, 10, 9, 8, 7, 6, 5, 4, 3, 2 or 1% to a reference quantity, level, value, number, frequency, percentage, dimension, size, amount, weight or length.

[0026] With respect to the use of substantially any plural and/or singular terms herein, those having skill in the art can translate from the plural to the singular and/or from the singular to the plural as is appropriate to the context and/or application. The various singular/plural permutations may be expressly set forth herein for sake of clarity. The indefinite article “a” or “an” does not exclude a plurality. A single processor or other unit may fulfill the functions of several items recited in the claims. The mere fact that certain measures are recited in mutually different dependent claims does not indicate that a combination of these measures cannot be used to an advantage. Any reference signs in the claims should not be construed as limiting the scope.

[0027] Provided herein are methods and compositions for preventing, treating, and diagnosing cancer comprising the use of neoantigens. Neoantigens herein comprise peptides encoded by nucleic acids having frameshift mutations, in particular relevant here are FSPs created by mis-initiation of exon 1, causing a frameshift in the mRNA and a long stretch of non-natural amino acids that are, in some cases, recognized as a non-self peptide by the immune system.

[0028] The success of checkpoint inhibitors in cancer therapy is largely attributed to activating the patient's immune response to their tumor's neoantigens arising from DNA mutations. This realization has motivated the interest in personal cancer vaccines based on sequencing the patient's tumor DNA to discover neoantigens. Embodiments provided herein relate to an additional, unrecognized source of tumor neoantigens. In some embodiments, errors in transcription of microsatellites (MS) and mis-splicing of exons create highly immunogenic frameshift (FS) neoantigens in tumors. Another source is the frameshift peptides (FSPs) produced by mis-initiation of translation of exon 1. The sequence of these FS neoantigens are bioinformatically predictable, allowing creation of a peptide array representing all possible neoantigen FS peptides. This array can be used to detect the antibody response in a patient to the FS peptides. A survey of 5 types of cancers revealed peptides that are personally reactive for each patient and those that are shared between individuals and even across different tumor types. This source of neoantigens and the method to discover them may be useful in developing cancer vaccines, diagnostics, and therapeutics.

[0029] As shown in FIG. 1, FSP formation by mis-initiation at Exon 1 is an error process in cancer cells. In normal cells errors in DNA replication are very rare and repaired. Transcription error rates are higher but also rare as are mis-splicing during intron excision. Additionally, the FS transcript with a premature termination may be degraded by Nonsense Mediated Decay (NMD). Aberrant proteins, including those with frameshifts are largely eliminated by the protein quality control system, Ubiquitin/Proteasome System (UPS). The net result is that in normal cells very few frameshift peptides are presented on MHC I/II or escape the cell to be presented to the immune system. Cancer Cell: All levels of information transfer become more error prone. More errors are made in DNA replication, but only when cells divide. Most DNA mutations are point mutations and encode low or non-immunogenic epitopes. Global transcription is increased and is generally less accurate and even more so through MSs producing INDELs. Most transcribed genes with MSs in the coding region will have more FS transcripts. RNA splicing is also far less accurate, creating more FS transcripts from each out-of-frame splicing between exons from the same gene and different genes. Relevant here, there is a large increase in mis-initiation of translation in tumor cells. Some of these mis-initiations will create FSPs. The substantial increase of the FS transcripts including from exon 1 mis-initiation overwhelms the RNA quality control systems, such as NMD. Consequently, more truncated proteins with the FS peptide will be translated. These unfolded truncated proteins, combined with aberrant proteins from other mutations, overwhelms the protein quality control system, leading to more frameshift peptides being presented on MHC I/II and mis-secreted or released from the cancer cell which the immune system can respond to. FIG. 2 depicts the process by which mis-initiation occurs in cancer cells versus normal cells.

[0030] Personal cancer vaccines are promising as a new therapeutic treatment. These vaccines are currently based on mutations in tumor DNA. In some embodiments, variants in RNA production and translation create frameshift neoantigens that may be another source of neoantigens for personal vaccines. Because there are only 34,733 of these antigens possible from mis-initiation at exon 1, a simple peptide array can be used to detect antibodies generated against the exon 1 FSPs.

[0031] Checkpoint inhibitor immunotherapeutics are revolutionizing cancer therapy. However, even in the most responsive cancers a substantial portion (50%-80%) of the patients have poor to no positive response. A surprising finding in the analysis of these patients was that one of the best correlates of response has been the total number of neoantigens in the tumor. This is also the case for patients with high microsatellite instability (MSI) where the production of FS neoantigens drives the effective anti-tumor immune responses. The realization of the immunological importance of these DNA mutations has spawned the effort to develop personal vaccines. As promising as early studies are of these vaccines, a major problem is that the majority of tumors will not have enough neoantigen-generating mutations to sustain development of a personal vaccine. For example, melanoma tumors have a high mutational level with an average of 200 neoepitope mutations. This provides a large number to algorithmically screen for optimal antigenic presentation. In recent reports of two Phase I clinical trials of personal melanoma vaccines, starting with 90 to about 2,000 personal neoantigens, 10 or 20 were identified for the vaccine. However, in glioblastoma multiforme (GBM) only 3.5% patients had a high tumor mutation load, and further analysis showed that only a very small subset of GBM patients would potentially benefit from checkpoint blockade treatment. This is also consistent with a lack of response in GBM patients to checkpoint inhibitors. Massive genomic sequencing results indicated that GBM, ovarian cancer, breast adenocarcinoma and many other cancer types had very low number non-synonymous mutations, which will make these cancers difficult targets for personalized cancer vaccines.

[0032] To solve this problem, methods and compositions are provided herein related to an alternative source of neoantigens which expand the scope of the application and efficacy of the neoantigen based cancer vaccines. In the process of becoming a tumor, not only does the DNA mutation rate increase with faster cell divisions, but also there is a disruption of basic cellular functions, including RNA transcription, splicing, the correct initiation of translation, and the quality control system on peptides. These processes, combined with the disrupted quality control system in tumor cells, can lead to the production of FS peptides and exposure of the FS epitopes to the immune system. Embodiments provided herein relate to FSPs produced by errors in RNA translation as a source of cancer neoantigens and a simple system to detect them.

[0033] Described herein are frameshift peptides resulting from exon 1 mis-initiation of translation (exon 1 FSPs). SEQ ID NOs: 1-19,997 are frameshift peptides resulting from mis-initiation of translation at exon 1. SEQ ID NOs: 1-10,025 are the subset of these that showed reactivity with lung cancer patient samples, as described in Example 3. SEQ ID NOs: 1-32 are the subset that were associated with a patient's response to immunotherapeutics, as described in Example 3. Disclosed herein are peptide arrays which include one or more exon 1 FSPs. Further disclosed herein are vaccines including one or more exon 1 FSPs. Further disclosed herein are therapeutic molecules which bind one or more exon 1 FSPs. In some embodiments, the exon 1 FSPs include one or more peptides having a sequence set forth in SEQ ID NOs: 1-19,997. In some embodiments, the exon 1 FSPs include one or more peptides having a sequence set forth in SEQ ID NOs: 1-10,025. In some embodiments, the exon 1 FSPs include one or more peptides having a sequence set forth in SEQ ID NOs: 1-32.

[0034] Disclosed herein are models for how errors in translation initiation could create frameshift neoantigens. Using an array comprising all predicted FS peptides with specific qualifications, human sera from patients with 5 different cancers have higher antibody reactivity than people without cancer. Three different patterns of high antibody reactive can be determined-pan-cancer, cancer-type focused, and personal.

[0035] The methods and compositions provided herein indicates that FSPs produced at the RNA level in tumor cells may be a good source of neoantigens for vaccines for several reasons. First, these FSPs produce neoantigens which are more likely to be immunogenic than neo-epitopes encoded by single nucleotide mutations. Second, because of the predictable number of candidates it should be possible to use a peptide array to screen for immune reactive neoantigens. This approach would be much simpler than sequencing tumor DNA obtained from a biopsy. Third, because any expressed gene has the potential to produce neoantigens, it may not be necessary to limit the vaccine to oncological driver genes. Finally, it should be difficult for the tumor cells to evolve away from the vaccine since these FSPs are variants, not heritable mutations. Particularly if the FS antigen was produced in RNA from an essential gene, the tumor cells would need to restrict MHC presentation or create an immune suppressive environment to escape an immune response.

[0036] Some embodiments provided herein relate to methods of screening all FSPs that can be formed by mis-initiation of translation, which is then used to develop cancer vaccines, for therapeutics, or for diagnostics. One embodiment of such methods of screen is set forth in FIG. 3, which depicts bioinformatically designating all exon 1 FSPs greater than 10 amino acids in length. An array of 15 amino acid peptides is designed, representing all exon 1 FSPs that were selected. The arrays may include up to 400,000 exon 1 FSPs. For example, the peptide arrays may include about 5000, about 7500, about 10000, about 12500, about 15000, about 17500, about 20000, about 22500, about 25000, about 27500, about 30000, about 32500, about 35000, about 37500, about 40000, about 50000, about 100000, about 200000, about 300000, or about 400000 FSPs. The arrays may then be used in a variety of applications, as shown in FIG. 3, including for diagnostics, immune checkpoint inhibitor (ICI) response predictors, vaccine components, or therapeutics. As a diagnostic, for example, the arrays may be used by screening different cancers from many different patients to determine which FSPs to use in diagnostics. In ICI response predictors, the arrays may be used to screen against many responders and non-responders and patients with an immune related adverse event (irAE) given immunotherapeutics for ICI respond predictors. For vaccines, the arrays may be used by screening patients with a particular cancer to determine therapeutic vaccine components or many different cancers to determine preventative vaccines. For therapeutics, the arrays may be used by screening patients with particular cancers to find common exon 1 FSPs and thereby develop therapeutics to bind the common exon 1 FSPs.

[0037] Elements of the model are supported by other published work. The immunological reactivity of FS neoantigens is the presumed basis of the effectiveness of PD-1 in most MSI-H cancers. It also explains the responsiveness of renal cancer to CPI therapy—these cancers have low point mutation levels but high FS mutations.

[0038] An important aspect of this source of neoantigens is that it may allow extending the personal vaccines to more patients and tumor types. Many tumors have relatively low numbers of DNA mutations and probably could not support constructing a vaccine. Estimates from published mutational surveys of various tumors indicate that only 40% of patients could be treated with personal vaccines. However, the methods and compositions provided herein predict that the RNA FSPs would be produced in any cancer type, even if the DNA mutation level is low.

[0039] The model also predicts that there may be recurrent FSs produced in different tumors. This is substantiated, for example, in the table of FIG. 5, showing that recurrent FSPs from exon 1 mis-initiation can be used to diagnose breast cancer and compose a potential general vaccine for breast cancer.

[0040] Sets of FS peptides were found that had enriched activity in individual tumor types. A collection of a set of these peptides could potentially be used to constitute a general, therapeutic vaccine or one focused on a particular tumor or set of tumors. Such vaccines would have an advantage over a personal vaccine of being pre-made but would have fewer antigens in common with the tumor. Conceivably, pan-cancer peptides could be used to create a prophylactic cancer vaccine, as has been proposed for cancer associated antigens. However, as shown in comparing late and early-stage pancreatic cancer profiles, a prophylactic vaccine from FS neoantigens would be best constituted from peptides reactive at early stages of cancer. Clinical trials in dogs were recently initiated of a prophylactic vaccine that is designed to be broadly protective. Accordingly, embodiments provided herein relate to therapeutic or prophylactic vaccines that are developed using the FSPs identified herein.

[0041] In summary, the methods and compositions provided herein relate to another class of neoantigens that are useful in developing different types of cancer vaccines. Also provided herein are array formats for directly detecting immune responses to these tumor antigens.

[0042] Some embodiments provided herein relate to methods and compositions for classification and characterization of subjects with respect to their likely response to treatment with an immunotherapeutic. In some embodiments, the methods include predicting a subject's response to treatment with an immune checkpoint inhibitor (ICI) therapy. In some embodiments, the methods include contacting a biological sample from the subject to an array as described herein. In some embodiments, the array comprises frameshift peptides (FSPs) resulting from exon 1 mis-initiation of translation.

[0043] Some embodiments provided herein relate to methods of measuring antibody affinity to a plurality of peptides. In some embodiments, the methods include contacting a biological sample from the subject to a peptide array comprising one or more exon 1 frameshift peptides. In some embodiments, the subject has cancer. In some embodiments, the biological sample is a blood sample. In some embodiments, the biological sample is a peripheral blood sample.

[0044] In some embodiments, the peptide array includes 400,000 total peptides. For example, the peptide arrays may include about 5000, about 7500, about 10000, about 12500, about 15000, about 17500, about 20000, about 22500, about 25000, about 27500, about 30000, about 32500, about 35000, about 37500, about 40000, about 50000, about 100000, about 200000, about 300000, or about 400000 peptides.

[0045] In some embodiments, the peptide array may further include other peptides that are not from exon 1 frameshift peptide mis-initiation, such as frameshift peptides caused by RNA processing error such as exon mis-splicing. In some embodiments, the peptide array further includes frameshift peptides caused by indels in transcription.

[0046] In some embodiments, the one or more exon 1 frameshift peptides include a peptide having a sequence selected from any one of SEQ ID NO: 1-19,997. In some embodiments, the one or more exon 1 frameshift peptides include a peptide having a sequence selected from any one of SEQ ID NO: 1-10,025. In some embodiments, the one or more exon 1 frameshift peptides include a peptide having a sequence selected from any one of SEQ ID NO: 1-32. In some embodiments, the one or more exon 1 frameshift peptides include a peptide having at least 90% sequence identity to any one of SEQ ID NO: 1-19,997. In some embodiments, the one or more exon 1 frameshift peptides include a peptide having at least 95% sequence identity to any one of SEQ ID NO: 1-19,997. In some embodiments, the one or more exon 1 frameshift peptides include a peptide having at least 99% sequence identity to any one of SEQ ID NO: 1-19,997. In some embodiments, the one or more exon 1 frameshift peptides include a peptide having at least 90% sequence identity to any one of SEQ ID NO: 1-10,025. In some embodiments, the one or more exon 1 frameshift peptides include a peptide having at least 95% sequence identity to any one of SEQ ID NO: 1-10,025. In some embodiments, the one or more exon 1 frameshift peptides include a peptide having at least 99% sequence identity to any one of SEQ ID NO: 1-10,025. In some embodiments, the one or more exon 1 frameshift peptides include a peptide having at least 90% sequence identity to any one of SEQ ID NO: 1-32. In some embodiments, the one or more exon 1 frameshift peptides include a peptide having at least 95% sequence identity to any one of SEQ ID NO: 1-32. In some embodiments, the one or more exon 1 frameshift peptides include a peptide having at least 99% sequence identity to any one of SEQ ID NO: 1-32.

[0047] In some embodiments, the methods further include measuring the presence or absence of antibodies having affinity to one or more of the FSPs resulting from exon 1 mis-initiation of translation. In some embodiments, measuring comprises measuring binding of antibodies in the biological sample, wherein the antibodies have affinity to the one or more exon 1 frameshift peptides. In some embodiments, measuring is performed with a device, such as a laser scanner or other fluorescence imager. In some embodiments, measuring is qualitative, such as, for example, the presence or absence of antibodies is measured. In some embodiments, measuring is quantitative, for example, intensity or strength of binding is measured.

[0048] In some embodiments, the methods further include quantifying a level or levels of the antibodies having affinity to one or more of the exon 1 frameshift peptides. In some embodiments, quantifying is performed electrically, for example, with a device that receives measurements of binding and outputs a numerical value (level) corresponding to the measured binding. In some embodiments, levels of binding are quantified for each of one or more exon 1 frameshift peptides.

[0049] In some embodiments, the methods further include generating an exon 1 signature of the subject based on the quantified level or levels of binding to the plurality of the exon 1 peptides. In some embodiments, the exon 1 signature is computationally generated. In some embodiments, the exon 1 signature is predictive of a clinical outcome of an immunotherapeutic treatment in the subject.

[0050] Some embodiments provided herein relate to methods of classifying whether a subject might experience an immune-related adverse event in response to treatment. In some embodiments, the methods provided herein include the steps of: (a) contacting a biological sample from the subject to a frameshift array comprising a plurality of exon 1 frameshift peptides; (b) detecting the presence or absence of antibodies having affinity to one or more of the exon 1 frameshift peptides in the contacted biological sample; (c) quantifying a level of the antibodies having affinity to one or more of the exon 1 frameshift peptides to form an exon 1 signature of the subject; and (d) classifying the subject as having a high likelihood of experiencing an adverse event based on comparison of the subject's exon 1 binding pattern to one or more standards, wherein the signature distinguishes a person likely to have an adverse event from those that are unlikely to have an adverse event in response to immunotherapy.

[0051] In some embodiments, the immunotherapeutic is a cytotoxic T-lymphocyte-associated protein 4 (CTLA-4) inhibitor, a programmed death-ligand 1 (PD-L1) inhibitor, a programmed cell death protein 1 (PD-1) inhibitor, an OX40 agonist, an antibody to B7 ligands, or a BY55 monoclonal antibody. In some embodiments, the subject has already received treatment with the immunotherapeutic. In some embodiments, the subject has not yet received treatment with an immunotherapeutic.

[0052] In some embodiments, the methods further include creating a record indicating the subject is likely to respond to the immunotherapeutic treatment based on the exon 1 signature. In some embodiments, the methods further include creating a record indicating the subject is not likely to respond to the immunotherapeutic treatment based on the exon 1 signature. In some embodiments, the methods further include creating a record indicating the subject is likely to have an adverse event to the immunotherapeutic treatment based on the exon 1 signature. In some embodiments, the methods further include creating a record indicating the subject is not likely to have an adverse event to the immunotherapeutic treatment based on the exon 1 signature. In some embodiments, the record is created on a computer readable medium.

[0053] As used herein, the term “substrate” refers to any type of solid support to which the peptides are immobilized. Examples of substrates include, but are not limited to, microarrays; beads; columns; optical fibers; wipes; nitrocellulose; nylon; glass; quartz; diazotized membranes (paper or nylon); silicones; polyformaldehyde; cellulose; cellulose acetate; paper; ceramics; metals; metalloids; semiconductive materials; coated beads; magnetic particles; plastics such as polyethylene, polypropylene, and polystyrene; gel-forming materials; silicates; agarose; polyacrylamides; methylmethracrylate polymers; sol gels; porous polymer hydrogels; nanostructured surfaces; nanotubes (such as carbon nanotubes); and nanoparticles (such as gold nanoparticles or quantum dots). When bound to a substrate, the peptides can be directly linked to the support, or attached to the surface via a linker. Thus, the solid substrate and/or the peptides can be derivatized using methods known in the art to facilitate binding of the peptides to the solid support, so long as the derivatization does not eliminate detection of binding between the peptides and antibodies in the sera.

[0054] As used herein, the term “sample” means non-biological samples and biological samples. Non-biological samples include those prepared in vitro comprising varying concentrations of a target molecule of interest in solution. Biological samples include, without limitation, blood, lymph, urine, saliva, sputum, other bodily secretions, cells, and tissue specimens and dilutions of them. Any suitable biological sample can be used. For example, a biological sample can be a specimen obtained from a subject (for example, a mammal such as a human, canine, mouse, rat, pig, guinea pig, cow, monkey, or ape) or can be derived from such a subject. A subject can provide a plurality of biological samples. A biological sample also can be a biological fluid such as urine, blood, plasma, serum, saliva, tears, or mucus, or such a sample absorbed onto a paper or polymer substrate. A biological sample can be further fractionated, if desired, to a fraction containing particular cell types. In some cases, sera are obtained from the individual using techniques known in the art. The biological sample can be a blood, tissue, or other bodily sample. The blood sample can be a peripheral blood sample.

[0055] Embodiments of the methods provided herein may be sensitive and involve small quantities of biological samples from a subject. In some embodiments, biological samples from a subject are too concentrated and require a dilution prior to being contacted with an array of the present disclosure. A plurality of dilutions can be applied to a biological sample prior to contacting the sample with an array of the present disclosure. A dilution can be a serial dilution, which can result in a geometric progression of the concentration in a logarithmic fashion. For example, a ten-fold serial dilution can be 1 M, 0.01 M, 0.001 M, and a geometric progression thereof. A dilution can be, for example, a one-fold dilution, a two-fold dilution, a three-fold dilution, a four-fold dilution, a five-fold dilution, a six-fold dilution, a seven-fold dilution, an eight-fold dilution, a nine-fold dilution, a ten-fold dilution, a sixteen-fold dilution, a twenty-five-fold dilution, a thirty-two-fold dilution, a sixty-four-fold dilution, and/or a one-hundred-and-twenty-five-fold dilution, or any dilution appropriate for the required analysis.

[0056] The peptide array can be contacted with the biological sample under any suitable conditions to promote binding of antibodies in the sample to peptides immobilized on the array. Thus, the methods presented herein are not limited by any specific type of binding conditions employed. Such conditions will vary depending on the array being used, the type of substrate, the density of the peptides arrayed on the substrate, desired stringency of the binding interaction, and nature of the competing materials in the binding solution. In a certain embodiments, the conditions comprise a step to remove unbound antibodies from the addressable array.

[0057] Similarly, any suitable detection technique can be used in the methods provided herein to detect binding of antibodies in the biological sample to peptides on the array to generate a subject's exon 1 signature. In one embodiment, any type of detectable label can be used to label peptides on the array, including but not limited to radioisotope labels, fluorescent labels, luminescent labels, and electrochemical labels (such as, for example, ligand labels with different electrode mid-point potential, where detection comprises detecting electric potential of the label). Alternatively, bound antibodies can be detected, for example, using a detectably labeled secondary antibody.

[0058] As used herein, the term “detect,” “detection,” “detectable,” or “detecting” has its ordinary meaning as understood in light of the specification, and is understood both on a quantitative and a qualitative level, as well as a combination thereof. It thus includes quantitative, semi-quantitative, and qualitative measurements of measuring a cancer in a subject, using the methods and compositions as disclosed herein.

[0059] As used herein, the expression “a subject” has its ordinary meaning as understood in light of the specification, and means a human or non-human mammal. The subject may exhibit one or more symptoms or indications of cancer, and/or have been diagnosed with cancer, including a solid tumor and may need treatment for the same. For example, the subject may be a human or canine. In many embodiments, the term “subject” may be interchangeably used with the term “patient.” For example, a human subject may be diagnosed with a primary or a metastatic tumor and/or with one or more symptoms or indications including, but not limited to, unexplained weight loss, general weakness, persistent fatigue, loss of appetite, fever, night sweats, bone pain, shortness of breath, swollen abdomen, chest pain/pressure, enlargement of spleen, and elevation in the level of a cancer-related biomarker.

[0060] The term “malignancy” has its ordinary meaning as understood in light of the specification, and refers to a non-benign tumor or a cancer. As used herein, the term “cancer” includes a malignancy characterized by deregulated or uncontrolled cell growth. Exemplary cancers include carcinomas, sarcomas, leukemias, and lymphomas. Cancer includes primary malignant tumors (for example, those whose cells have not migrated to sites in the subject's body other than the site of the original tumor) and secondary malignant tumors (for example, those arising from metastasis, the migration of tumor cells to secondary sites that are different from the site of the original tumor). A cancer may include, for example, gastric, myeloid, colon, nasopharyngeal, esophageal, and prostate tumors, glioma, neuroblastoma, breast cancer, lung cancer, ovarian cancer, colorectal cancer, thyroid cancer, leukemia (for example, Adult T-cell leukemia, Acute monocytic leukemia, Acute myeloid leukemia, Acute promyelocytic leukemia, myelogenous leukemia, lymphocytic leukemia, acute myelogenous leukemia (AML), chronic myeloid leukemia (CML), acute lymphoblastic leukemia (ALL), T-lineage acute lymphoblastic leukemia or T-ALL chronic lymphocytic leukemia (CLL), myelodysplastic syndrome (MDS), hairy cell leukemia), lymphoma (Hodgkin's lymphoma (HL), non-Hodgkin's lymphoma (NHL)), multiple myeloma, bladder, renal, gastric (for example, gastrointestinal stromal tumors (GIST)), liver, melanoma and pancreatic cancer, sarcoma, Adenocarcinoma, Astrocytoma, Bone Cancer, Brain Tumor, Burkitt's lymphoma, Carcinoma, Cervical Cancer, Chronic Lymphocytic Leukemia, Chronic myelogenous leukemia, Endometrial cancer, Glioblastoma multiforme, Glioma, Hepatocellular carcinoma, Hodgkin's lymphoma, Inflammatory breast cancer, Kidney Cancer, Leukemia, Lymphoma, Malignant Mesothelioma, Medulloblastoma, Melanoma, Multiple myeloma, Neuroblastoma, Non-Hodgkin Lymphoma, Non-Small Cell Lung Cancer, Pancreatic Cancer, Pituitary tumor, Retinoblastoma, Skin Cancer, Small Cell Lung Cancer, Squamous cell carcinoma, Stomach cancer, T-cell leukemia, T-cell lymphoma, and Wilms' tumor.

[0061] As used herein the term “frameshift mutation” has its ordinary meaning as understood in light of the specification, and is a mutation or variant causing a change in the reading frame of the RNA. Thus, a FSP is a peptide in which a frame has changed due to a frameshift mutation or variant. In some embodiments provided herein, a frameshift includes two or more pooled frameshifts. As used herein, the term “pooled” refers to a plurality of frameshift samples that have been combined to create a new composition. In some cases, the plurality of FSPs comprise one or more peptides as set forth in SEQ ID NOs: 1-19,997, which are the potential FSPs predicted from exon 1 mis-initiation as based on current annotated sequences in humans. In some cases, the plurality of FSPs comprise one or more peptides as set forth in SEQ ID NOs: 1-10,025. In some cases, the plurality of FSPs comprise one or more peptides as set forth in SEQ ID NOs: 1-32,

[0062] As used herein the term “immunotherapeutic” or “IT” has its ordinary meaning as understood in light of the specification, and refers to a compound such as a therapeutic molecule that is used to, in this case, treat cancer by inducing, enhancing or suppressing the immune response. Immunotherapeutics encompass immune checkpoint inhibitors, antibody-drug conjugates (ADCs), monoclonal antibodies, T-cell therapy, small molecules, and bispecific antibodies (bsAbs). Antibody-drug conjugates include monoclonal antibodies linked to biologically active drugs to combine the targeting ability of antibodies as well as the cytotoxic ability of the drug. T-cell therapy involves reprogramming a patient's own immune T cells to attack tumors. One type of well-known T-cell therapy comprises adoptive transfer of chimeric antigen receptor (CAR) T-cells. As used herein, the term “chimeric antigen receptor” has its ordinary meaning as understood in light of the specification, and refers to a fusion protein of the membrane or intracellular signaling region of T-cell activating proteins (for example, CD3-zeta chain, CD28, 41BBL, OX40, ICOS, high-affinity receptor for IgE (FcεcRI) and other T-cell activating proteins) and the antigen-binding site (such as, for example, single-chain Fv fragment) of a cancer antigen-specific antibody. Bispecific antibodies are recombinant proteins that can bind to two different types of antigen at the same time. For example, a bsAb can be engineered to bind a cytotoxic cell and a target tumor cell. That way, the bsAb brings the cytotoxic cell and the target tumor cell into close proximity and facilitates tumor treatment.

[0063] In certain embodiments, the immunotherapeutic is selected from Tremelimumab (CTLA-4 blocking antibody), OX40 agonists (for example, agonist antibodies), antibodies to B7 ligands (for example, anti-B7-H1, anti-B7-H3, anti-B7-H3, anti-B7-H4), durvalumab (MEDI4736, anti-PD-L1 antibody), MK-3475 (PD-1 blocker), Nivolumab (anti-PD-1 antibody), Pembrolizumab (anti-PD-1 antibody), Pidilizumab/CT-011, BY55 monoclonal antibody, AMP224 (anti-PD-L1 antibody), BMS-936559 (anti-PD-L1 antibody), MPLDL3280A (anti-PD-L1 antibody), MSB0010718C (anti-PD-L1 antibody), and Yervoy/ipilimumab (anti-CTLA-4 checkpoint inhibitor). Many new inhibitor targets are being investigated. In some cases, IT treatment comprises a combination therapy in which two or more immunotherapeutics are administered.

[0064] As used herein the terms “checkpoint inhibitor” and “checkpoint pathway inhibitor” are used interchangeably and has its ordinary meaning as understood in light of the specification, and refer to negative regulatory molecules, usually antibodies, that block or inhibit anti-T cell anti-tumor function to enhance tumor killing. Checkpoint inhibitors include, without limitation, CTLA-4, PD-L1, PD-L2, PD-1, B7-H3, B7-H4, BTLA, HVEM, TIM3, GAL9, LAG3, VISTA, KIR, 2B4, CD160, CGEN-15049, CHK1, CHK2, A2aR, and a B-7 family ligand such as B7-1, B7-2, B7-DC, B7-H1, B7-H2, B7-H3, B7-H4, B7-H5, B7-H6 and B7-H7 (or any combination thereof), or a combination thereof (for example, a combination of CTLA-4 and PD-L1 or PD-L2).

[0065] As used herein, the term “side effect,” “side effects,” “adverse event,” or “adverse events” has its ordinary meaning as understood in light of the specification, and refers to the unacceptable or undesirable adverse symptoms resulting from or associated with the administration of a particular treatment such as an IT therapy. Side effects specifically to immunotherapeutics are termed “immune related adverse events” (irAE). While side effects vary by the type of therapy, common side effects of IT therapies include, without limitation fatigue, infusion related reactions, dermatological toxicity, diarrhea/colitis, hepatotoxicity, pneumonitis, hyper- and hypo-thyroidism. Immune-related adverse events are generally graded from 1-4. Grades 3 and 4 are considered serious and can require immunosuppression treatment. Patients with irAE are just as likely to have a positive response to treatment. Occurrence of Grade 3 or 4 event can prohibit the patient from further IT therapy. Therefore, knowing ahead of time which patients are more likely to have an event would allow closer monitoring to preempt a Grade 3 or 4 event.

[0066] Any appropriate criteria can be used to confirm a subject's responsiveness to treatment with an IT. For example, in certain embodiments, responsiveness to treatment by an IT is measured by at least one criterion selected from the group consisting of clinical benefit rate, survival until mortality, pathological complete response, semi-quantitative measures of pathologic response, clinical complete remission, clinical partial remission, clinical stable disease, recurrence-free survival, metastasis free survival, disease free survival, circulating tumor cell decrease, circulating marker response, and RECIST criteria.

[0067] Some embodiments provided herein relate to methods of treating or preventing cancer. In some embodiments, the methods include administering a therapeutic molecule. In some embodiments, the therapeutic molecule is designed to bind frameshift peptides (FSPs) resulting from exon 1 mis-initiation of translation. In some embodiments, the therapeutic molecule is an antibody or synthetic antibody. In some embodiments, the therapeutic molecule includes a fragment of an antibody (such as a variable region (“scFv”)) or a derivative of an antibody or a fragment of an antibody, such as a CAR-T cell.

[0068] In some embodiments, the therapeutic molecule binds a FSP resulting from exon 1 mis-initiation of translation. In some embodiments, the FSP includes one or more peptides as set forth in SEQ ID NOs: 1-19,997. In some embodiments, the FSP includes one or more peptides having at least 90% sequence identity to any one of SEQ ID NO: 1-19,997. In some embodiments, the FSP includes one or more peptides having at least 95% sequence identity to any one of SEQ ID NO: 1-19,997. In some embodiments, the FSP includes one or more peptides having at least 99% sequence identity to any one of SEQ ID NO: 1-19,997. In some embodiments, the FSP includes one or more peptides as set forth in SEQ ID NOs: 1-10,025. In some embodiments, the FSP includes one or more peptides having at least 90% sequence identity to any one of SEQ ID NO: 1-10,025. In some embodiments, the FSP includes one or more peptides having at least 95% sequence identity to any one of SEQ ID NO: 1-10,025. In some embodiments, the FSP includes one or more peptides having at least 99% sequence identity to any one of SEQ ID NO: 1-10,025. In some embodiments, the FSP includes one or more peptides as set forth in SEQ ID NOs: 1-32. In some embodiments, the FSP includes one or more peptides having at least 90% sequence identity to any one of SEQ ID NO: 1-32. In some embodiments, the FSP includes one or more peptides having at least 95% sequence identity to any one of SEQ ID NO: 1-32. In some embodiments, the FSP includes one or more peptides having at least 99% sequence identity to any one of SEQ ID NO: 1-32.

[0069] In some embodiments, the therapeutic molecule is a vaccine. Some embodiments relate to administering a vaccine. In some embodiments, the vaccine comprises FSPs resulting from exon 1 mis-initiation of translation. In some embodiments, the FSPs comprise one or more peptides as set forth in SEQ ID NOs: 1-19,997. In some embodiments, the FSPs include one or more peptides having at least 90% sequence identity to any one of SEQ ID NO: 1-19,997. In some embodiments, the FSPs include one or more peptides having at least 95% sequence identity to any one of SEQ ID NO: 1-19,997. In some embodiments, the FSPs include one or more peptides having at least 99% sequence identity to any one of SEQ ID NO: 1-19,997. In some embodiments, the FSPs comprise one or more peptides as set forth in SEQ ID NOs: 1-10,025. In some embodiments, the FSPs include one or more peptides having at least 90% sequence identity to any one of SEQ ID NO: 1-10,025. In some embodiments, the FSPs include one or more peptides having at least 95% sequence identity to any one of SEQ ID NO: 1-10,025. In some embodiments, the FSPs include one or more peptides having at least 99% sequence identity to any one of SEQ ID NO: 1-10,025. In some embodiments, the FSPs comprise one or more peptides as set forth in SEQ ID NOs: 1-32. In some embodiments, the FSPs include one or more peptides having at least 90% sequence identity to any one of SEQ ID NO: 1-32. In some embodiments, the FSPs include one or more peptides having at least 95% sequence identity to any one of SEQ ID NO: 1-32. In some embodiments, the FSPs include one or more peptides having at least 99% sequence identity to any one of SEQ ID NO: 1-32.

[0070] In some embodiments, biological samples, such as blood, from cancer patients are applied to the FSP arrays described herein to determine reactivity of peptides for each patient. In some embodiments, FSPs unique to the patient are used in a personal vaccine. In some embodiments, FSPs shared between different patients are used for off-the-shelf therapeutic or preventative vaccines. In some embodiments, the vaccine compositions include one or more frameshift peptides (FSPs) resulting from exon 1 mis-initiation of translation. In some embodiments, the FSPs include one or more peptides as set forth in SEQ ID NOs: 1-19,997. In some embodiments, the FSPs include one or more peptides having at least 90% sequence identity to any one of SEQ ID NO: 1-19,997. In some embodiments, the FSPs include one or more peptides having at least 95% sequence identity to any one of SEQ ID NO: 1-19,997. In some embodiments, the FSPs include one or more peptides having at least 99% sequence identity to any one of SEQ ID NO: 1-19,997. In some embodiments, the FSPs include one or more peptides as set forth in SEQ ID NOs: 1-10,025. In some embodiments, the FSPs include one or more peptides having at least 90% sequence identity to any one of SEQ ID NO: 1-10,025. In some embodiments, the FSPs include one or more peptides having at least 95% sequence identity to any one of SEQ ID NO: 1-10,025. In some embodiments, the FSPs include one or more peptides having at least 99% sequence identity to any one of SEQ ID NO: 1-10,025. In some embodiments, the FSPs include one or more peptides as set forth in SEQ ID NOs: 1-32. In some embodiments, the FSPs include one or more peptides having at least 90% sequence identity to any one of SEQ ID NO: 1-32. In some embodiments, the FSPs include one or more peptides having at least 95% sequence identity to any one of SEQ ID NO: 1-32. In some embodiments, the FSPs include one or more peptides having at least 99% sequence identity to any one of SEQ ID NO: 1-32.

[0071] In some embodiments, the vaccine compositions further include an adjuvant. In some embodiments, the adjuvant is ABM2, AS01B, AS02, AS02A, Adjumer, Adjuvax, Algammulin, Alum, Aluminum phosphate, Aluminum potassium sulfate, Bordetella pertussis, Calcitriol, Chitosan, Cholera toxin, CpG, Dibutyl phthalate, Dimethyldioctadecylammonium bromide (DDA), Freund's adjuvant, Freund's complete, Freund's incomplete (IFA), GM-CSF, GMDP, Gamma Inulin, Glycerol, HBSS (Hank's Balanced Salt Solution), polyinosinic-polycytidylic acid stabilized with polylysine and carboxymethylcellulose (poly-ICLC, also known as Hiltonol), IL-12, IL-2, Imiquimod, Interferon-Gamma, ISCOM, Lipid Core Peptide (LCP), Lipofectin, Lipopolysaccharide (LPS), Liposomes, MF59, MLP+TDM, Monophosphoryl lipid A, Montanide IMS-1313, Montanide ISA 206, Montanide ISA 720, Montanide ISA-51, Montanide ISA-50, nor-MDP, Oil-in-water emulsion, P1005 (non-ionic copolymer), Pam3Cys (lipoprotein), Pertussis toxin, Poloxamer, QS21, RaLPS, Ribi, Saponin, Seppic ISA 720, Soybean Oil, Squalene, Syntex Adjuvant Formulation (SAF), Synthetic polynucleotides (poly IC/poly AU), TiterMax Tomatine, Vaxfectin, XtendIII, or Zymosan.

[0072] Accordingly, some embodiments are provided herein as set forth in the following numbered alternatives:
[0073] 1. An array comprising frameshift peptides (FSPs) resulting from exon 1 mis-initiation of translation.
[0074] 2. The array of alternative 1, wherein the FSPs on the array are spaced between 3 and 9 μm.
[0075] 3. The array of any one of alternatives 1-2, wherein the array is used to diagnose cancer.
[0076] 4. The array of any one of alternatives 1-2, wherein the array is used to predict response to immunotherapy.
[0077] 5. The array of any one of alternatives 1-2, wherein the array is used to predict adverse responses to immunotherapy.
[0078] 6. The array of any one of alternatives 1-5, wherein the FSPs comprise one or more peptides as set forth in SEQ ID NOs: 1-19,997.
[0079] 7. The array of any one of alternatives 1-6, wherein the array comprises at least about 2500, about 5000, about 7500, about 10000, about 12500, about 15000, about 17500, about 20000, about 22500, about 25000, about 27500, about 30000, about 32500, about 35000, about 37500, about 40000, about 50000, about 100000, about 200000, about 300000, or about 400000 FSPs.
[0080] 8. A vaccine composition comprising frameshift peptides (FSPs) resulting from exon 1 mis-initiation of translation.
[0081] 9. The vaccine composition of alternative 8, further comprising an adjuvant.
[0082] 10. The vaccine composition of alternative 9, wherein the adjuvant is ABM2, AS01B, AS02, AS02A, Adjumer, Adjuvax, Algammulin, Alum, Aluminum phosphate, Aluminum potassium sulfate, Bordetella pertussis, Calcitriol, Chitosan, Cholera toxin, CpG, Dibutyl phthalate, Dimethyldioctadecylammonium bromide (DDA), Freund's adjuvant, Freund's complete, Freund's incomplete (IFA), GM-CSF, GMDP, Gamma Inulin, Glycerol, HBSS (Hank's Balanced Salt Solution), Hiltonol, IL-12, IL-2, Imiquimod, Interferon-Gamma, ISCOM, Lipid Core Peptide (LCP), Lipofectin, Lipopolysaccharide (LPS), Liposomes, MF59, MLP+TDM, Monophosphoryl lipid A, Montanide IMS-1313, Montanide ISA 206, Montanide ISA 720, Montanide ISA-51, Montanide ISA-50, nor-MDP, Oil-in-water emulsion, P1005 (non-ionic copolymer), Pam3Cys (lipoprotein), Pertussis toxin, Poloxamer, QS21, RaLPS, Ribi, Saponin, Seppic ISA 720, Soybean Oil, Squalene, Syntex Adjuvant Formulation (SAF), Synthetic polynucleotides (poly IC/poly AU), TiterMax Tomatine, Vaxfectin, XtendIII, or Zymosan.
[0083] 11. A method of detecting cancer in a subject, the method comprising: contacting a biological sample from the subject to an array comprising frameshift peptides (FSPs) resulting from exon 1 mis-initiation of translation; and measuring antibody reactivity to the FSPs resulting from mis-initiation of translation in tumors.
[0084] 12. The method of alternative 11, wherein the FSPs comprise one or more peptides as set forth in SEQ ID NOs: 1-19,997.
[0085] 13. The method of any one of alternatives 11-12, wherein the FSPs are fixed on a substrate.
[0086] 14. The method of alternative 13, wherein the substrate comprises glass, silica, composite, resin, or combination thereof.
[0087] 15. The method of any one of alternatives 11-14, wherein the array is configured to detect binding by at least one of fluorescence, luminescence, calorimetry, chromatography, radioactivity, Bio-Layer Interferometry, and surface plasmon resonance.
[0088] 16. The method of any one of alternatives 11-15, wherein the array comprises at least about 2500, about 5000, about 7500, about 10000, about 12500, about 15000, about 17500, about 20000, about 22500, about 25000, about 27500, about 30000, about 32500, about 35000, about 37500, about 40000, about 50000, about 100000, about 200000, about 300000, or about 400000 FSPs.
[0089] 17. The method of any one of alternatives 11-16, wherein the biological sample comprises blood, serum, plasma, cerebrospinal fluid, saliva, urine, or combinations thereof.
[0090] 18. The method of any one of alternatives 11-17, wherein the biological sample comprises an antibody.
[0091] 19. The method of any one of alternatives 11-18, wherein the subject is a mammal.
[0092] 20. The method of any one of alternatives 11-19, wherein the subject is a human, a dog, a cat, a mouse, a rat, a rabbit, a horse, a cow, or a pig.
[0093] 21. The method of any one of alternatives 11-20, wherein the subject is suspected of having a cancer.
[0094] 22. The method of any one of alternatives 11-21, wherein the cancer is selected from the group consisting of Acute lymphoblastic leukemia, Acute monocytic leukemia, Acute myeloid leukemia, Acute promyelocytic leukemia, Adenocarcinoma, Adult T-cell leukemia, Astrocytoma, Bladder cancer, Bone Cancer, Brain Tumor, Breast Cancer, Burkitt's lymphoma, Carcinoma, Cervical Cancer, Chronic Lymphocytic Leukemia, Chronic myelogenous leukemia, Colon Cancer, Colorectal cancer, Endometrial cancer, Glioblastoma multiforme, Glioma, Hepatocellular carcinoma, Hodgkin's lymphoma, Inflammatory breast cancer, Kidney Cancer, Leukemia, Lung cancer, Lymphoma, Malignant Mesothelioma, Medulloblastoma, Melanoma, Multiple myeloma, Neuroblastoma, Non-Hodgkin Lymphoma, Non-Small Cell Lung Cancer, Ovarian Cancer, Pancreatic Cancer, Pituitary tumor, Prostate cancer, Retinoblastoma, Skin Cancer, Small Cell Lung Cancer, Squamous cell carcinoma, Stomach cancer, T-cell leukemia, T-cell lymphoma, Thyroid cancer, and Wilms' tumor.
[0095] 23. A method of treating or preventing cancer, comprising administering a therapeutic molecule designed to bind frameshift peptides (FSPs) resulting from exon 1 mis-initiation of translation.
[0096] 24. The method of alternative 23, wherein the therapeutic molecule is an antibody or synthetic antibody.
[0097] 25. The method of any one of alternatives 23-24, wherein the therapeutic molecule binds a FSP resulting from exon 1 mis-initiation of translation.
[0098] 26. The method of any one of alternatives 23-25, wherein the therapeutic molecule is a vaccine.
[0099] 27. The method of alternative 26, wherein the vaccine comprises FSPs resulting from exon 1 mis-initiation of translation.
[0100] 28. The method of any one of alternatives 23-27, wherein the FSPs comprise one or more peptides as set forth in SEQ ID NOs: 1-19,997.
[0101] 29. A method of predicting response to an immunotherapy, comprising identifying frameshift peptides (FSPs) resulting from exon 1 mis-initiation of translation.
[0102] 30. The method of alternative 29, wherein the method is used to predict adverse immune responses to immunotherapy.
[0103] 31. The method of any one of alternatives 29-30, wherein the FSPs comprise one or more peptides as set forth in SEQ ID NOs: 1-19,997.

[0104] Additional variations than those described herein will be apparent from this disclosure. For example, depending on the embodiment, certain acts, events, or functions of any of the compositions, systems, or methods described herein can be performed in a different sequence, can be added, merged, or left out altogether. Moreover, in certain embodiments, acts or events can be performed concurrently. In addition, different tasks or processes can be performed by different machines and/or computing systems that can function together.

[0105] The foregoing description and examples have been set forth merely to illustrate the disclosure and are not intended as being limiting. Each of the disclosed aspects and embodiments of the present disclosure may be considered individually or in combination with other aspects, embodiments, and variations of the disclosure. In addition, unless otherwise specified, none of the steps of the methods of the present disclosure are confined to any particular order of performance. Modifications of the disclosed embodiments incorporating the spirit and substance of the disclosure may occur to persons skilled in the art and such modifications are within the scope of the present disclosure.

### Examples

[0106] Embodiments described herein are further defined in the following Examples. It should be understood that these Examples are given by way of illustration only. From the above discussion and these Examples, one skilled in the art can ascertain the essential characteristics of this disclosure, and without departing from the spirit and scope thereof, can make various changes and modifications of the embodiments of the disclosure to adapt it to various usages and conditions. Thus, various modifications of the embodiments of the disclosure, in addition to those shown and described herein, will be apparent to those skilled in the art from the foregoing description. Such modifications are also intended to fall within the scope of the appended claims. The disclosure of each reference set forth herein is incorporated herein by reference in its entirety.

### Example 1: FSP Analysis

[0107] To identify potential putative transcripts, that when translated would result in a frame-shifted neo-peptide, an algorithm was applied to two publicly available datasets to identify FSPs that would result from mis-initiation of translation at the exon 1 of each gene. FSP predicted to be less than 8 amino acids long or were homologous to normal protein sequences were eliminated.

[0108] A total number of 64 non-cancer control samples and 13 pancreatic stage 1 cancer samples, 85 late-stage cancer samples from 5 cancer types were tested on the FS array, detailed information was summarized in Table 1. All samples were acquired from collaborators and were informed consent upon collection through the institute's own Institutional Review Board (IRB). All samples were anonymized before receipt at Arizona State University (ASU) via IRB protocol No. STUDY00003722, ‘Receipt of Deidentified Human Serum for Immunosignature Analysis’ and protocol No. 0912004625, ‘Profiling Biological Sera for Unique Antibody Signatures’. All experiments were performed in accordance with the approval protocol.

TABLE 1
Samples tested on Human 400K FS array

| | Number | |
|---|---|---|
| Sample Type | of Samples | Source |
| Breast Cancer (BC) | 17 | UT Southwestern |
| Lung Cancer (LC) | 17 | UT Southwestern |
| GBM | 17 | Barrows Neurological Institute |
| Pancreatic Cancer (PC) | 17 | TGEN |
| Pancreatic Cancer Stage 1 | 13 | TGEN |
| Gastric Cancer (GC) | 17 | Japan |
| Control | 64 | Varied Sources |

### 400K Frameshift Peptide Array Assay

[0109] Serum was diluted 1:100 in binding buffer (0.01M Tris-HCl, pH 7.4, 1% alkali-soluble casein, 0.05% Tween-20) and 150 μl diluted samples were loaded into each compartment of the 12-plex array and incubated overnight at room temperature or 4° C. After sample binding, the arrays were washed 3× in wash buffer (1× TBS, 0.05% Tween-20), 10 min per wash. Primary sample binding was detected via Alexa Fluor® 647-conjugated goat anti-human IgG secondary antibody (Jackson ImmunoResearch #109-605-098). The secondary antibody was diluted 1:10,000 (final concentration 0.15 ng/μl) in secondary binding buffer (1× TBS, 1% alkali-soluble casein, 0.05% Tween-20). Arrays were incubated with secondary antibody for 3 h at room temperature, washed 3× in wash buffer (10 min per wash), 30 secs in reagent-grade water, and then dried by centrifuging at 690 RPM for 5 mins. All washes and centrifugations were done on a Little Dipper 650C Microarray Processor (SciGene) with preset programs. Fluorescent signal of the secondary antibody was detected by scanning at 635 nm at 2 μm resolution and 15% gain, using an MS200 microarray scanner (Roche NimbleGen). The 34,733 predicted possible exon 1 FSPs were included in the 400K peptide array. The remainder of the FSPs were predicted from exon mis-splicing or INDELs in encoded microsatellites.

[0110] Each array was normalized to its median florescence for analysis. Three patterns of FS feature reactivity that were higher in cancer than non-cancer were found: common reactivity against FS peptides across all 5 cancer types; cancer type specific reactivity and personal reactivity. Reactivity against ˜7000 selected peptides are shown in FIG. 4A. Common reactivity and cancer type reactivity in 5 cancer types were marked with black squares. Non-cancer control samples had very low, sporadic reactivity in these FS peptides. As noted in FIG. 4A, there were also peptides that were commonly reactive in a cancer type. Based on this analysis a set of peptides could be chosen to optimize the number in common for a particular cancer. This is depicted in FIG. 4D for the 5 tumor types. The top 100 peptides based on the maximum coverage for the particular cancer type were chosen. These vaccine compositions are referred to herein as “focused” vaccines, as it is clear from the FIG. 4D that many of the peptides optimal for a particular cancer are shared across other cancer types.

[0111] Total reactivity on the 400K arrays was evaluated in the 5 cancer types and non-cancer samples with two methods. The first method compares the number of significant peptides in the cancer and control samples using fold change and p-values. By this method, BC, GC, PC and LC cancer samples had significantly more FS peptides compared to control samples which met the fold change and p-value criteria described in FIG. 4B. The exception is GBM where the reactivity in the controls was higher than the GBM samples. The second method used a scoring method for each FS peptide. A peptide is scored as positive if it is higher than six times the standard deviation (6SD) from the mean value of non-cancers for the peptide. All 5 cancer types had more positive FS peptides than the non-cancer controls.

[0112] The analysis of individual cancer samples within the same cancer type using the scoring method showed that there were three patterns of reactivity. Most of the positive FS peptides (about 69% to about 80%) were personal for that individual. However, about 16% to about 19% of the positive peptides were shared between two samples in that cancer type, with about 1.5% to about 6.9% shared between 3 or more. The distribution of these classes is shown in FIG. 4C. Gastric cancer samples had the highest shared FS response (6.9% were shared in 3 or more). This is consistent with the very high correlation coefficients in several gastric cancer samples.

[0113] In FIGS. 4D and 4E, people without cancer have sporadic antibody reactivity to some of the peptides. This has also been noted that healthy individuals have antibody and T-cell responses to tumor associated antigens. This could be due to random background cross-reactive IgG antibodies unrelated to cancer. It was previously shown that monoclonal antibodies are capable of binding random sequence peptides with high affinity, even though the peptides do not contain a sequence resembling the cognate site. Alternatively, this reactivity could be a manifestation of immune surveillance eliminating potential tumor cells. Any cell that produced and presented FS antigens, whether tumor or not, could be susceptible to this elimination, effectively a “bad cell” response.

[0114] Finally, it was determined if there were FS peptides that were common across all 5 cancer types that met the p-value and frequency requirements. In FIG. 4E, exemplary 100 candidate FS peptides for a pan-cancer (at least for the 5 considered) vaccine are presented. It has been found that there are extremely few recurrent mutations in the DNA of certain tumor types and with low chance of being immunogenic. In contrast common reactive FS variants can readily be identified.

[0115] All of the samples used for this analysis were from patients with late-stage cancer. Cancer vaccines could also potentially be used for treatment of early-stage cancers, and it is unclear whether early and late-stage cancer vaccines would require different components. 20,000 most reactive and recurrent peptides were compared to non-cancer for both the late stage and stage 1 pancreatic cancer. As evident in FIG. 4F, most of the peptides did not overlap between the late and early stages of pancreatic cancer. This implies that an early and late-stage vaccine would require distinct peptide compositions.

### Example 2: Exon 1 Frameshift Peptides

[0116] The array of all possible predicted RNA-defined frameshift peptides (FSP) was used in the analysis presented in FIG. 5. Analysis of the array revealed 19,997 FSP arising from mis-initiation of transcription at exon 1 encoded from the 5′ end of the RNA. These 19,997 FSP are referred to as Exon 1 FSP. The array contained 32,194 of FSP arising from a splicing error at exon 2 encoded from the 5′ end of the RNA. The 32,194 FSP are referred to as Exon 2 FSPs. The IgG signals of the array demonstrated that the level of IgG reactivity to Exon 1 FSP was equal to the level of IgG reactivity to Exon 2 FSP. The level of IgG reactivity to Exon 1 FSP was also equal to the level of IgG reactivity to Exon 3 FSP.

[0117] The unexpected result of robust antibody reactivity to Exon 1 FSP suggests the utility of Exon 1 FSP for use as cancer vaccines and/or cancer diagnostics. Exon 1 FSP are presumed to result from errors involving translation initiation in the ribosome. Translation mis-initiation in the ribosome gives the Exon 1 FSP and the associated antibodies a unique diagnostic profile compared to Exon 2 FSP, Exon 3 FSP, and their associated antibodies. For example, literature evidence suggests that cancerous tumors are correlated with an increased frequency of errors in translation initiation in the ribosome. Exon 1 FSP resulted in a 78% accuracy when predicting stage 1 BC compared to a 54% accuracy displayed by Exon 2 FSP in the same prediction. Exon 1 FSP includes 37 peptides that are reactive in 10% or more of patients having stage 1 BC. Exon 2 FSP includes 29 peptides that are reactive in 10% or more of patients having stage 1 BC. These FSP could serve as the basis of vaccines (FIG. 5). In FIG. 5, sera samples from women with stage 1 breast cancer were run on the FSP arrays. In the top panel, FSP from exon 1 and 2 were used to classify the positive and negative samples. Exon 1 peptides performed better than exon 2 peptides as diagnostic. In the bottom panel, reactive peptides that were so in more than 10% of the women with stage 1 breast cancer were chosen as vaccine candidates. More FSP met the requirements from exon 1 than exon 2.

### Example 3: Exon 1 FSPs to Predict Immunotherapy Response

[0118] Blood samples from 66 lung cancer patients undergoing immunotherapy were tested on a peptide array including Exon 1 frameshift peptides. Analysis of binding revealed 10,025 Exon 1 frameshift peptides that were bound by the lung cancer samples (SEQ ID NOs: 1-10,025). Among these, 32 were associated with immunotherapy treatment response. These Exon 1 frameshift peptides are presented in SEQ ID NOs: 1-32.

[0119] Samples were purchased from Indivmed, GmBH (Hamburg, Germany). The samples were obtained from patients malignant neoplasms of the upper lobe, middle lobe, bronchus or lung. Patients had undergone treatment with one or more checkpoint inhibitors including PD-1 inhibitors or PD-L1 inhibitors. Tumor response (including complete remission, partial remission, minimal response, stable disease, or progressive disease) had been noted for each sample.

[0120] Samples were assayed on a high-density peptide microarray. We designed and produced theses high-density, in situ-synthesized peptide microarrays that display informatically predicted FSPs. Each array contains 374,082 15-mer peptides corresponding to 190,865 predicted frameshift neoantigens that could be generated from i) exon splicing errors, ii) exon 1 translational mis-initiation or iii) transcriptional slippage within microsatellite regions. There are 34,733 exon 1 mis-initiation FSPs on the array.

[0121] Binding of antibodies within the serum samples to the peptides on the array was measured quantitatively. Specifically, serum samples were diluted 1:50 into an incubation buffer (0.75% casein in phosphate buffered saline with 0.25% tween20, PBST). The diluted sera samples (200 ml) were incubated in individual arrays using a gasketed cassette at room temperature for 24 hours. Following 3 washes with 1× PBST, peptide bound antibodies were detected by incubation with 4 nM of Dylight 550 labeled goat anti-human Fc IgG secondary antibody (ThermoFisher Scientific, Cat #SA5-10135) in 0.75% casein/PBST at 37° C. for 1 hr. Slides were washed 3 times with 1× PBST, twice with dH₂O and once each with 40% and 100% isopropanol. Slides were dried by centrifuging at 800 RPM for 2 minutes. The fluorescent signal of bound secondary antibody was detected in an InnoScan 910 laser scanner (Innopsys, France) and the raw relative fluorescent units (RFU) were extracted and tabulated using MAPIX (Innopsys, France) gridding software.

[0122] Analysis via a chi-square test identified 226 peptides which significantly differentiated samples based on immunotherapy response to treatment. Of these 226 frameshift peptides, 32 were Exon 1 frameshift peptides. At least one of these 32 Exon 1 frameshift peptides are significantly reactive in 23 of the samples; two or more of these Exon 1 frameshift peptides are reactive in 15 samples. Using standard contrast scoring, every sample which demonstrated reactivity on two or more of the 32 Exon 1 frameshift peptides was correctly classified. However, 34 of the 66 samples showed less than 2 reactive FSPS. These samples were considered indeterminate. Removing the 32 Exon 1 frameshift peptides from the whole 226 model causes an increase in the indeterminate rate by 7.6%, indicating that the exon 1 FSPs provided information for classifying the patient samples.

[0123] Results are presented in FIG. 6. The exon 1 FSP response to treatment prediction model is compared to observed response outcomes. A heat map representation of observed or predicted responders (bottom) and observed or predicted non-responders (top) was prepared to visualize the model performance.

[0124] While preferred embodiments of the present disclosure have been shown and described herein, it will be obvious to those skilled in the art that such embodiments are provided by way of example only. Numerous variations, changes, and substitutions will now occur to those skilled in the art without departing from the disclosure. It should be understood that various alternatives to the embodiments of the disclosure described herein may be employed in practicing the disclosure. It is intended that the following claims define the scope of the disclosure and that methods and structures within the scope of these claims and their equivalents be covered thereby.

[0125] All publications, patents, and patent applications mentioned in this specification are herein incorporated by reference to the same extent as if each individual publication, patent, or patent application was specifically and individually indicated to be incorporated by reference.

The application's sequence listing, which the Patent Office published only in electronic form, follows.

SEQUENCE LISTING (19997 sequences)

SEQ ID NO: 1 - protein, 15 aa, synthetic construct
AAAAAGAGGPGGGDA

SEQ ID NO: 2 - protein, 15 aa, synthetic construct
AIAWCWPPAAPTSGR

SEQ ID NO: 3 - protein, 15 aa, synthetic construct
ALGAAPSRAGRGRPG

SEQ ID NO: 4 - protein, 15 aa, synthetic construct
ANVPPGLLLGSLRAH

SEQ ID NO: 5 - protein, 15 aa, synthetic construct
APAPAPDPAAPPARA

SEQ ID NO: 6 - protein, 15 aa, synthetic construct
APPPAGPAAAAAPRP

SEQ ID NO: 7 - protein, 15 aa, synthetic construct
APPPGPQLLWLCGLH

SEQ ID NO: 8 - protein, 15 aa, synthetic construct
APPPPPGFRCCAVSG

SEQ ID NO: 9 - protein, 15 aa, synthetic construct
APSPPRPRRRPTPTS

SEQ ID NO: 10 - protein, 15 aa, synthetic construct
ARRQRRREGGKERGA

SEQ ID NO: 11 - protein, 15 aa, synthetic construct
ARRRRGARGGPGAVP

SEQ ID NO: 12 - protein, 15 aa, synthetic construct
ARRRRRGPRAPNRPP

SEQ ID NO: 13 - protein, 15 aa, synthetic construct
ARRRRRRHHHQRGDA

SEQ ID NO: 14 - protein, 15 aa, synthetic construct
GAAPTASVSRPGVGG

SEQ ID NO: 15 - protein, 15 aa, synthetic construct
GALPRGPAVHQVPAA

SEQ ID NO: 16 - protein, 15 aa, synthetic construct
GAPLSLSPQRMHPLA

SEQ ID NO: 17 - protein, 15 aa, synthetic construct
GAPLSPTSQSACTLA

SEQ ID NO: 18 - protein, 15 aa, synthetic construct
GAPPEPATAAARSPD

SEQ ID NO: 19 - protein, 15 aa, synthetic construct
GAPVASQRRRRRRRS

SEQ ID NO: 20 - protein, 15 aa, synthetic construct
GGRGGGGGRGARLLG

SEQ ID NO: 21 - protein, 15 aa, synthetic construct
GPPAVAPLVAGQPGL

SEQ ID NO: 22 - protein, 15 aa, synthetic construct
GPPNALAQPRPPGWS

SEQ ID NO: 23 - protein, 15 aa, synthetic construct
GPPPPAGRGDPARGG

SEQ ID NO: 24 - protein, 15 aa, synthetic construct
GPRGARRPRPPQSAA

SEQ ID NO: 25 - protein, 15 aa, synthetic construct
PAAAAADHGLGRRFG

SEQ ID NO: 26 - protein, 15 aa, synthetic construct
PAALPDAAAGGGARR

SEQ ID NO: 27 - protein, 15 aa, synthetic construct
PAAYSSSSCLAAWAR

SEQ ID NO: 28 - protein, 15 aa, synthetic construct
PAPARASSSARSWRT

SEQ ID NO: 29 - protein, 15 aa, synthetic construct
PAPPPPLPAPPVQPL

SEQ ID NO: 30 - protein, 15 aa, synthetic construct
PGGPSSGVVPLWVFL

SEQ ID NO: 31 - protein, 15 aa, synthetic construct
PGPCCTRALSRRGMG

SEQ ID NO: 32 - protein, 15 aa, synthetic construct
PGPDPLWENQVWGAV

SEQ ID NO: 33 - protein, 15 aa, synthetic construct
AAPRRTLSSTSATRH

SEQ ID NO: 34 - protein, 15 aa, synthetic construct
AATATATRAGAAPAA

SEQ ID NO: 35 - protein, 15 aa, synthetic construct
AAVRPGRGAGLASAY

SEQ ID NO: 36 - protein, 15 aa, synthetic construct
ALRGASLGHGAAARA

SEQ ID NO: 37 - protein, 15 aa, synthetic construct
ASCWDLMASWGPRCG

SEQ ID NO: 38 - protein, 15 aa, synthetic construct
ASRRRRAHERLRVQP

SEQ ID NO: 39 - protein, 15 aa, synthetic construct
ATASEEAAKTGRRRG

SEQ ID NO: 40 - protein, 15 aa, synthetic construct
CAPRVRPPGRRRRCA

SEQ ID NO: 41 - protein, 15 aa, synthetic construct
CCCRCCCCRRRPPGR

SEQ ID NO: 42 - protein, 15 aa, synthetic construct
CCIQRPPLAGGISWL

SEQ ID NO: 43 - protein, 15 aa, synthetic construct
CFFESFSILSGVILP

SEQ ID NO: 44 - protein, 15 aa, synthetic construct
CHLKLSSRKTKRSLL

SEQ ID NO: 45 - protein, 15 aa, synthetic construct
EPTSSSRSSLRTALC

SEQ ID NO: 46 - protein, 15 aa, synthetic construct
GALQSASRLPSERRR

SEQ ID NO: 47 - protein, 15 aa, synthetic construct
GAPLPGAGRREPEQR

SEQ ID NO: 48 - protein, 15 aa, synthetic construct
GAPRRQGRDAAPAGR

SEQ ID NO: 49 - protein, 15 aa, synthetic construct
GAPRRRRAAPGDLGQ

SEQ ID NO: 50 - protein, 15 aa, synthetic construct
GGSLQTRLPAETEAW

SEQ ID NO: 51 - protein, 15 aa, synthetic construct
GLGRAPRPPGRTVAA

SEQ ID NO: 52 - protein, 15 aa, synthetic construct
GPGAGRGAGGGAFPL

SEQ ID NO: 53 - protein, 15 aa, synthetic construct
GRAGAGGGAGGRALR

SEQ ID NO: 54 - protein, 15 aa, synthetic construct
GRGAGGGRGARGGSG

SEQ ID NO: 55 - protein, 15 aa, synthetic construct
GSHGRRPRATRRRYP

SEQ ID NO: 56 - protein, 15 aa, synthetic construct
GVPGAGGGAGGGGSG

SEQ ID NO: 57 - protein, 15 aa, synthetic construct
GVRTTRRRTGPGLGR

SEQ ID NO: 58 - protein, 15 aa, synthetic construct
HHPAAERRGLRGEGA

SEQ ID NO: 59 - protein, 15 aa, synthetic construct
HRRPPGRTRPHRQPQ

SEQ ID NO: 60 - protein, 15 aa, synthetic construct
HSLQPSISLGRRRPK

SEQ ID NO: 61 - protein, 15 aa, synthetic construct
IQTGAEDRVWLLWRR

SEQ ID NO: 62 - protein, 15 aa, synthetic construct
ISSGTGDGEHGDGRR

SEQ ID NO: 63 - protein, 15 aa, synthetic construct
ISSVSYCESLIFPCG

SEQ ID NO: 64 - protein, 15 aa, synthetic construct
IVTVPPKRRPPSRRR

SEQ ID NO: 65 - protein, 15 aa, synthetic construct
LDGPGAGAGAGAGAG

SEQ ID NO: 66 - protein, 15 aa, synthetic construct
LQRLLRCALRGQLIL

SEQ ID NO: 67 - protein, 15 aa, synthetic construct
LRPPGRPAEGGGPAG

SEQ ID NO: 68 - protein, 15 aa, synthetic construct
MASSTWRSTRRCPSP

SEQ ID NO: 69 - protein, 15 aa, synthetic construct
PAPRVPRAAAAASPA

SEQ ID NO: 70 - protein, 15 aa, synthetic construct
PGAGAGARASAALRP

SEQ ID NO: 71 - protein, 15 aa, synthetic construct
PGLRVRRAKLGRAGC

SEQ ID NO: 72 - protein, 15 aa, synthetic construct
PGRWTPAQRAAVSPP

SEQ ID NO: 73 - protein, 15 aa, synthetic construct
PQGPGAGAPSSMAPP

SEQ ID NO: 74 - protein, 15 aa, synthetic construct
QADHGSIGGGGRDRH

SEQ ID NO: 75 - protein, 15 aa, synthetic construct
QQACAVAPSVRATSR

SEQ ID NO: 76 - protein, 15 aa, synthetic construct
QSSPARLSATRRRRP

SEQ ID NO: 77 - protein, 15 aa, synthetic construct
RAPGTRRRRPGDAAR

SEQ ID NO: 78 - protein, 15 aa, synthetic construct
RCCTAGRRPPGRLRG

SEQ ID NO: 79 - protein, 15 aa, synthetic construct
RKRCVPSAWITSRTP

SEQ ID NO: 80 - protein, 15 aa, synthetic construct
RPDPGGGGAGGGRSE

SEQ ID NO: 81 - protein, 15 aa, synthetic construct
RPPGICRLLRTPGSQ

SEQ ID NO: 82 - protein, 15 aa, synthetic construct
RPSPSPRPRGTPSSR

SEQ ID NO: 83 - protein, 15 aa, synthetic construct
RRDCRRGRGKGLGRP

SEQ ID NO: 84 - protein, 15 aa, synthetic construct
RRPGRGASDAARRRP

SEQ ID NO: 85 - protein, 15 aa, synthetic construct
RRSCTRPTRRRRPAP

SEQ ID NO: 86 - protein, 15 aa, synthetic construct
RTTRRCRLEPLSPRT

SEQ ID NO: 87 - protein, 15 aa, synthetic construct
SAPARPRPRRSISCA

SEQ ID NO: 88 - protein, 15 aa, synthetic construct
SAPARRRRFLSHSPQ

SEQ ID NO: 89 - protein, 15 aa, synthetic construct
SAPPRSRPRRRRWTT

SEQ ID NO: 90 - protein, 15 aa, synthetic construct
SAPRCPWTPTCAPRP

SEQ ID NO: 91 - protein, 15 aa, synthetic construct
SAPRPFPASHHREPL

SEQ ID NO: 92 - protein, 15 aa, synthetic construct
SAPRRPCRAGRNRPL

SEQ ID NO: 93 - protein, 15 aa, synthetic construct
SPPRPPGRAGGGRRA

SEQ ID NO: 94 - protein, 15 aa, synthetic construct
SSRRGPGSSTRTATS

SEQ ID NO: 95 - protein, 15 aa, synthetic construct
SSRRRTLSTASSSMR

SEQ ID NO: 96 - protein, 15 aa, synthetic construct
STARRARPARAAQPG

SEQ ID NO: 97 - protein, 15 aa, synthetic construct
SYHRRPMPPRRPPGR

SEQ ID NO: 98 - protein, 15 aa, synthetic construct
TAPRPPRAPPRPPPR

SEQ ID NO: 99 - protein, 15 aa, synthetic construct
TRRRRPGNPQGRFRR

SEQ ID NO: 100 - protein, 15 aa, synthetic construct
VAAAAAAAPDPGGRA

SEQ ID NO: 101 - protein, 15 aa, synthetic construct
VAAAAAPRLGGDSEV

SEQ ID NO: 102 - protein, 15 aa, synthetic construct
VAAAAAQGAAGTAVE

SEQ ID NO: 103 - protein, 15 aa, synthetic construct
VAAAAEVALVAGPAT

SEQ ID NO: 104 - protein, 15 aa, synthetic construct
VAAAEHDQLRVQREL

SEQ ID NO: 105 - protein, 15 aa, synthetic construct
VAAAGAAAVVGAGPG

SEQ ID NO: 106 - protein, 15 aa, synthetic construct
VAAAGAPVRAAGHLH

SEQ ID NO: 107 - protein, 15 aa, synthetic construct
VAAAGGAGGMGLRAG

SEQ ID NO: 108 - protein, 15 aa, synthetic construct
VAAAGRGPGGRRRGG

SEQ ID NO: 109 - protein, 15 aa, synthetic construct
VAAAGTTGTGTRPPG

SEQ ID NO: 110 - protein, 15 aa, synthetic construct
VAAAGTVLRTAEGQA

SEQ ID NO: 111 - protein, 15 aa, synthetic construct
VAAALHEHGLWRPRP

SEQ ID NO: 112 - protein, 15 aa, synthetic construct
VAAENRACVPGASHQ

SEQ ID NO: 113 - protein, 15 aa, synthetic construct
VAAEPAALGHCGLQH

SEQ ID NO: 114 - protein, 15 aa, synthetic construct
VAAFSSSMLDASSWI

SEQ ID NO: 115 - protein, 15 aa, synthetic construct
VAAGAELRRAAADAR

SEQ ID NO: 116 - protein, 15 aa, synthetic construct
VAAGAPCPPVVPRAQ

SEQ ID NO: 117 - protein, 15 aa, synthetic construct
VAAGAPHEDRHQPVH

SEQ ID NO: 118 - protein, 15 aa, synthetic construct
VAAGRAAGPAAAGGY

SEQ ID NO: 119 - protein, 15 aa, synthetic construct
VAAGTCLPLGRLPAL

SEQ ID NO: 120 - protein, 15 aa, synthetic construct
VAAHGPAAAAAAAVL

SEQ ID NO: 121 - protein, 15 aa, synthetic construct
VAALCVLGRDECPGA

SEQ ID NO: 122 - protein, 15 aa, synthetic construct
VAALPLTALGRHLPG

SEQ ID NO: 123 - protein, 15 aa, synthetic construct
VAALRDAPDPGLGAV

SEQ ID NO: 124 - protein, 15 aa, synthetic construct
VAAPERGAAARAGDQ

SEQ ID NO: 125 - protein, 15 aa, synthetic construct
VAAQAGQAPAPQLRG

SEQ ID NO: 126 - protein, 15 aa, synthetic construct
VAAQPDPKPGSPRLL

SEQ ID NO: 127 - protein, 15 aa, synthetic construct
VAASGESLRAEAAHP

SEQ ID NO: 128 - protein, 15 aa, synthetic construct
VAATGLYPQKAGGSE

SEQ ID NO: 129 - protein, 15 aa, synthetic construct
VAAVAAAQRAAARAA

SEQ ID NO: 130 - protein, 15 aa, synthetic construct
VAAVAAPAGGGSWPA

SEQ ID NO: 131 - protein, 15 aa, synthetic construct
VAAWDPPRASRTENT

SEQ ID NO: 132 - protein, 15 aa, synthetic construct
VACHLSNIQDVPEWM

SEQ ID NO: 133 - protein, 15 aa, synthetic construct
VADAGRGGRGAGRGA

SEQ ID NO: 134 - protein, 15 aa, synthetic construct
VADQHKDGVFGQGHL

SEQ ID NO: 135 - protein, 15 aa, synthetic construct
VAEAAAPGGEAASAA

SEQ ID NO: 136 - protein, 15 aa, synthetic construct
VAEAAAPRLVALGAA

SEQ ID NO: 137 - protein, 15 aa, synthetic construct
VAEAAPGPAGWPSAG

SEQ ID NO: 138 - protein, 15 aa, synthetic construct
VAEEASEASTFPIRP

SEQ ID NO: 139 - protein, 15 aa, synthetic construct
VAEGPRRLHAPLEAR

SEQ ID NO: 140 - protein, 15 aa, synthetic construct
VAEGSHRGAPWNIAG

SEQ ID NO: 141 - protein, 15 aa, synthetic construct
VAERQPHGAGARALH

SEQ ID NO: 142 - protein, 15 aa, synthetic construct
VAESPATPLAIAQPV

SEQ ID NO: 143 - protein, 15 aa, synthetic construct
VAGAAPSFWLSRTCR

SEQ ID NO: 144 - protein, 15 aa, synthetic construct
VAGAAREAAAGWSSG

SEQ ID NO: 145 - protein, 15 aa, synthetic construct
VAGAEPPARRSIPGS

SEQ ID NO: 146 - protein, 15 aa, synthetic construct
VAGALDPGGPSGTWA

SEQ ID NO: 147 - protein, 15 aa, synthetic construct
VAGAVPPAQHSRPAA

SEQ ID NO: 148 - protein, 15 aa, synthetic construct
VAGESRGFAPGVGVL

SEQ ID NO: 149 - protein, 15 aa, synthetic construct
VAGGADRGQAVLRGA

SEQ ID NO: 150 - protein, 15 aa, synthetic construct
VAGGDAAPPLPAGPL

SEQ ID NO: 151 - protein, 15 aa, synthetic construct
VAGGKQLSPLLELRR

SEQ ID NO: 152 - protein, 15 aa, synthetic construct
VAGGLGDRPERGGRE

SEQ ID NO: 153 - protein, 15 aa, synthetic construct
VAGGVGPLSHYCPDS

SEQ ID NO: 154 - protein, 15 aa, synthetic construct
VAGLGRHPGGHAGHA

SEQ ID NO: 155 - protein, 15 aa, synthetic construct
VAGPPRMAQGSWTLA

SEQ ID NO: 156 - protein, 15 aa, synthetic construct
VAGRGRQARGGRRTP

SEQ ID NO: 157 - protein, 15 aa, synthetic construct
VAGTHHIAGTRPPRA

SEQ ID NO: 158 - protein, 15 aa, synthetic construct
VAGWVAPGRGGAGAA

SEQ ID NO: 159 - protein, 15 aa, synthetic construct
VAIAATNFHDALSSN

SEQ ID NO: 160 - protein, 15 aa, synthetic construct
VAIVCGAGGPAGLRG

SEQ ID NO: 161 - protein, 15 aa, synthetic construct
VAKTEEPGPLWRPGR

SEQ ID NO: 162 - protein, 15 aa, synthetic construct
VALHSELQGVGAHPH

SEQ ID NO: 163 - protein, 15 aa, synthetic construct
VALPEPLSLPTPDSG

SEQ ID NO: 164 - protein, 15 aa, synthetic construct
VAMADRGRPRTAGTG

SEQ ID NO: 165 - protein, 15 aa, synthetic construct
VAPAAVCPFAAASLC

SEQ ID NO: 166 - protein, 15 aa, synthetic construct
VAPEADSGAGSPRWF

SEQ ID NO: 167 - protein, 15 aa, synthetic construct
VAPGAPEAGPPVPLA

SEQ ID NO: 168 - protein, 15 aa, synthetic construct
VAPGPPEAEGGTARP

SEQ ID NO: 169 - protein, 15 aa, synthetic construct
VAPQTLCSPHDLPVA

SEQ ID NO: 170 - protein, 15 aa, synthetic construct
VAQARGGAAEERAEA

SEQ ID NO: 171 - protein, 15 aa, synthetic construct
VAQGGLLRPGALGAA

SEQ ID NO: 172 - protein, 15 aa, synthetic construct
VAQGLHNFPFLCNRC

SEQ ID NO: 173 - protein, 15 aa, synthetic construct
VAQGSLKLLGLGLPK

SEQ ID NO: 174 - protein, 15 aa, synthetic construct
VAQLQTSVSLHSHLP

SEQ ID NO: 175 - protein, 15 aa, synthetic construct
VAQLVAHPPVDRRGE

SEQ ID NO: 176 - protein, 15 aa, synthetic construct
VARGELEHQWDSETP

SEQ ID NO: 177 - protein, 15 aa, synthetic construct
VASAGAAPGCAAAGR

SEQ ID NO: 178 - protein, 15 aa, synthetic construct
VASAKAPETSPTAHA

SEQ ID NO: 179 - protein, 15 aa, synthetic construct
VASEKTEPQPVAFAP

SEQ ID NO: 180 - protein, 15 aa, synthetic construct
VASGESQEEGLGQVP

SEQ ID NO: 181 - protein, 15 aa, synthetic construct
VASPGTAMAPFVVHL

SEQ ID NO: 182 - protein, 15 aa, synthetic construct
VATAHHAHNPAQPGV

SEQ ID NO: 183 - protein, 15 aa, synthetic construct
VATCTTQPPPVAFPT

SEQ ID NO: 184 - protein, 15 aa, synthetic construct
VATEHPVQLLPQVSG

SEQ ID NO: 185 - protein, 15 aa, synthetic construct
VATETGVSSGASRAA

SEQ ID NO: 186 - protein, 15 aa, synthetic construct
VATGADAWPAGRGTI

SEQ ID NO: 187 - protein, 15 aa, synthetic construct
VATLGLLLPGEHHAE

SEQ ID NO: 188 - protein, 15 aa, synthetic construct
VATSAVSAAAAGGPA

SEQ ID NO: 189 - protein, 15 aa, synthetic construct
VAVASSPSPQSRQPV

SEQ ID NO: 190 - protein, 15 aa, synthetic construct
VAVGGPATGPAALGR

SEQ ID NO: 191 - protein, 15 aa, synthetic construct
VAVGGPGRPPGPFLL

SEQ ID NO: 192 - protein, 15 aa, synthetic construct
VAVPHRAGDSAGHRV

SEQ ID NO: 193 - protein, 15 aa, synthetic construct
VAVRAAQPDRAVQRV

SEQ ID NO: 194 - protein, 15 aa, synthetic construct
VAVSQPPLPRRLRAR

SEQ ID NO: 195 - protein, 15 aa, synthetic construct
VCAAYQAEPEEAEAE

SEQ ID NO: 196 - protein, 15 aa, synthetic construct
VCADHPRGAQLRQAG

SEQ ID NO: 197 - protein, 15 aa, synthetic construct
VCAGSAGDWPGRRFR

SEQ ID NO: 198 - protein, 15 aa, synthetic construct
VCAQADDAGFQSLSP

SEQ ID NO: 199 - protein, 15 aa, synthetic construct
VCARASREGDPAQDW

SEQ ID NO: 200 - protein, 15 aa, synthetic construct
VCEMDFSNFANTTEL

SEQ ID NO: 201 - protein, 15 aa, synthetic construct
VCERDLRGAAGLFGC

SEQ ID NO: 202 - protein, 15 aa, synthetic construct
VCERLEPDGADRGSG

SEQ ID NO: 203 - protein, 15 aa, synthetic construct
VCGDRGLQRAAAHDR

SEQ ID NO: 204 - protein, 15 aa, synthetic construct
VCGERPGTAGLVRGP

SEQ ID NO: 205 - protein, 15 aa, synthetic construct
VCGFRGPEAARQGGD

SEQ ID NO: 206 - protein, 15 aa, synthetic construct
VCGGRRCQGPYRAHR

SEQ ID NO: 207 - protein, 15 aa, synthetic construct
VCGHEGEVRPVPARE

SEQ ID NO: 208 - protein, 15 aa, synthetic construct
VCGLCAGQGFARVPR

SEQ ID NO: 209 - protein, 15 aa, synthetic construct
VCGPGPDSPPTPSPA

SEQ ID NO: 210 - protein, 15 aa, synthetic construct
VCGPLDGILLQQAEG

SEQ ID NO: 211 - protein, 15 aa, synthetic construct
VCGRWGDSWGHGGRG

SEQ ID NO: 212 - protein, 15 aa, synthetic construct
VCGSQHRGGPQGSHP

SEQ ID NO: 213 - protein, 15 aa, synthetic construct
VCGTAQSLADRLAPG

SEQ ID NO: 214 - protein, 15 aa, synthetic construct
VCHRGPTPDPRGPGG

SEQ ID NO: 215 - protein, 15 aa, synthetic construct
VCNSSQESEDGHQIM

SEQ ID NO: 216 - protein, 15 aa, synthetic construct
VCPEKRFDTELHLPL

SEQ ID NO: 217 - protein, 15 aa, synthetic construct
VCQGLSGQVQHGHQG

SEQ ID NO: 218 - protein, 15 aa, synthetic construct
VCQLPDINIAPRSNS

SEQ ID NO: 219 - protein, 15 aa, synthetic construct
VCSGQGRKRPWERRC

SEQ ID NO: 220 - protein, 15 aa, synthetic construct
VCSPEHPAHLAVPYA

SEQ ID NO: 221 - protein, 15 aa, synthetic construct
VCSSGTWACALQRFQ

SEQ ID NO: 222 - protein, 15 aa, synthetic construct
VCTTEVMMVIGVQKM

SEQ ID NO: 223 - protein, 15 aa, synthetic construct
VDAEIVPGPASVPHL

SEQ ID NO: 224 - protein, 15 aa, synthetic construct
VDAGRTPGVRGLGPP

SEQ ID NO: 225 - protein, 15 aa, synthetic construct
VDAYRQHDPTARSEV

SEQ ID NO: 226 - protein, 15 aa, synthetic construct
VDGGGSGAEADQPGG

SEQ ID NO: 227 - protein, 15 aa, synthetic construct
VDGLVCGCAVCGGCV

SEQ ID NO: 228 - protein, 15 aa, synthetic construct
VDNIAADTAAVWLGL

SEQ ID NO: 229 - protein, 15 aa, synthetic construct
VDPESHWQGGGVFQL

SEQ ID NO: 230 - protein, 15 aa, synthetic construct
VDPGEHIIPAASVMG

SEQ ID NO: 231 - protein, 15 aa, synthetic construct
VDPRGSGLGVRTRSR

SEQ ID NO: 232 - protein, 15 aa, synthetic construct
VDPSGRASSAAEALR

SEQ ID NO: 233 - protein, 15 aa, synthetic construct
VDPSGWQPLAEHAWG

SEQ ID NO: 234 - protein, 15 aa, synthetic construct
VDPVAVGPVAAAPGA

SEQ ID NO: 235 - protein, 15 aa, synthetic construct
VDQASTGASRAPRDP

SEQ ID NO: 236 - protein, 15 aa, synthetic construct
VDQPQIKESWHEEEQ

SEQ ID NO: 237 - protein, 15 aa, synthetic construct
VDTALAAVATDHFAT

SEQ ID NO: 238 - protein, 15 aa, synthetic construct
VDTALAVDMALAMEL

SEQ ID NO: 239 - protein, 15 aa, synthetic construct
VDTGGDRSGGPGCPQ

SEQ ID NO: 240 - protein, 15 aa, synthetic construct
VEACMRWPRWEASVW

SEQ ID NO: 241 - protein, 15 aa, synthetic construct
VEAGPGPSAAGRAPR

SEQ ID NO: 242 - protein, 15 aa, synthetic construct
VEAGRTARRTAMASA

SEQ ID NO: 243 - protein, 15 aa, synthetic construct
VEAGTRRGFPGSRPG

SEQ ID NO: 244 - protein, 15 aa, synthetic construct
VEAIITIHIPLIPAA

SEQ ID NO: 245 - protein, 15 aa, synthetic construct
VEAQAGETPAHQLGG

SEQ ID NO: 246 - protein, 15 aa, synthetic construct
VEARHRPHQCHRCPV

SEQ ID NO: 247 - protein, 15 aa, synthetic construct
VEASAATTALPAPAA

SEQ ID NO: 248 - protein, 15 aa, synthetic construct
VEDAEEEEALAQQGA

SEQ ID NO: 249 - protein, 15 aa, synthetic construct
VEEEASCGEKGRRTA

SEQ ID NO: 250 - protein, 15 aa, synthetic construct
VEEEEEEEDVEEEEE

SEQ ID NO: 251 - protein, 15 aa, synthetic construct
VEEHSVVGPLPEGGR

SEQ ID NO: 252 - protein, 15 aa, synthetic construct
VEELEAPHRCQSKGG

SEQ ID NO: 253 - protein, 15 aa, synthetic construct
VEELPPAAGRGTPSP

SEQ ID NO: 254 - protein, 15 aa, synthetic construct
VEENQCWGCRRPKHS

SEQ ID NO: 255 - protein, 15 aa, synthetic construct
VEFGGERPGNGSITA

SEQ ID NO: 256 - protein, 15 aa, synthetic construct
VEGGRRRGGGCGGGG

SEQ ID NO: 257 - protein, 15 aa, synthetic construct
VEGLAPRPELHWFPD

SEQ ID NO: 258 - protein, 15 aa, synthetic construct
VELPPWPRGGRAAAG

SEQ ID NO: 259 - protein, 15 aa, synthetic construct
VELTREASEDGVRAG

SEQ ID NO: 260 - protein, 15 aa, synthetic construct
VEMDTDTLCLSLSPP

SEQ ID NO: 261 - protein, 15 aa, synthetic construct
VEMHFEILSQSSKDT

SEQ ID NO: 262 - protein, 15 aa, synthetic construct
VEPFEQAPLLEHIFF

SEQ ID NO: 263 - protein, 15 aa, synthetic construct
VEPGAAALGARRRCL

SEQ ID NO: 264 - protein, 15 aa, synthetic construct
VEPGHRAGHLPAAPA

SEQ ID NO: 265 - protein, 15 aa, synthetic construct
VEPGLHHGGVVHGLP

SEQ ID NO: 266 - protein, 15 aa, synthetic construct
VEPGVPEAQAMCAIV

SEQ ID NO: 267 - protein, 15 aa, synthetic construct
VEPPRRDASTAAPPP

SEQ ID NO: 268 - protein, 15 aa, synthetic construct
VEPRDTQERLQHQDP

SEQ ID NO: 269 - protein, 15 aa, synthetic construct
VEPTAGPPQAHGLRG

SEQ ID NO: 270 - protein, 15 aa, synthetic construct
VEPYFCSVGSWISLI

SEQ ID NO: 271 - protein, 15 aa, synthetic construct
VEQGGADPQPAARRG

SEQ ID NO: 272 - protein, 15 aa, synthetic construct
VERAERAGGLTQGPA

SEQ ID NO: 273 - protein, 15 aa, synthetic construct
VERGPRRGCLAGAVG

SEQ ID NO: 274 - protein, 15 aa, synthetic construct
VESAEEEGYALGTVT

SEQ ID NO: 275 - protein, 15 aa, synthetic construct
VESCQRGAAPPGELC

SEQ ID NO: 276 - protein, 15 aa, synthetic construct
VESEQRHGQPEGHQD

SEQ ID NO: 277 - protein, 15 aa, synthetic construct
VESSPKCARLHGTAV

SEQ ID NO: 278 - protein, 15 aa, synthetic construct
VESWQHVGRAGSRVR

SEQ ID NO: 279 - protein, 15 aa, synthetic construct
VETCCGATRASTPSA

SEQ ID NO: 280 - protein, 15 aa, synthetic construct
VETETSEDIRRNPGS

SEQ ID NO: 281 - protein, 15 aa, synthetic construct
VEWVFHRREFPLSHL

SEQ ID NO: 282 - protein, 15 aa, synthetic construct
VFADGAGPGQRSELG

SEQ ID NO: 283 - protein, 15 aa, synthetic construct
VFEPHGRTVPSVSPS

SEQ ID NO: 284 - protein, 15 aa, synthetic construct
VFQEDGEVGGQQCGY

SEQ ID NO: 285 - protein, 15 aa, synthetic construct
VFQEGRRRLESTQCA

SEQ ID NO: 286 - protein, 15 aa, synthetic construct
VGAEAPGKLPRPQGS

SEQ ID NO: 287 - protein, 15 aa, synthetic construct
VGAGCALGGSGCPFR

SEQ ID NO: 288 - protein, 15 aa, synthetic construct
VGAGPDARDAGPVDG

SEQ ID NO: 289 - protein, 15 aa, synthetic construct
VGAHGAAALPAGTAA

SEQ ID NO: 290 - protein, 15 aa, synthetic construct
VGALHPQSTRLLAPG

SEQ ID NO: 291 - protein, 15 aa, synthetic construct
VGATAPVAPGAGVQP

SEQ ID NO: 292 - protein, 15 aa, synthetic construct
VGCDCSSGRFLWFGF

SEQ ID NO: 293 - protein, 15 aa, synthetic construct
VGCRGGGCFPQSQGQ

SEQ ID NO: 294 - protein, 15 aa, synthetic construct
VGDCSTCSYHSCTRR

SEQ ID NO: 295 - protein, 15 aa, synthetic construct
VGEALAPPPQHPHSN

SEQ ID NO: 296 - protein, 15 aa, synthetic construct
VGEEHLEDLSFLLLG

SEQ ID NO: 297 - protein, 15 aa, synthetic construct
VGEHGRAAAPGHDQP

SEQ ID NO: 298 - protein, 15 aa, synthetic construct
VGENGDQDDRVRLGH

SEQ ID NO: 299 - protein, 15 aa, synthetic construct
VGEVEAKRRMGLWAL

SEQ ID NO: 300 - protein, 15 aa, synthetic construct
VGGAGCSHCCYWCLD

SEQ ID NO: 301 - protein, 15 aa, synthetic construct
VGGAGVLVPETILLP

SEQ ID NO: 302 - protein, 15 aa, synthetic construct
VGGDPESAAALGRQF

SEQ ID NO: 303 - protein, 15 aa, synthetic construct
VGGGVGRGLAELLHR

SEQ ID NO: 304 - protein, 15 aa, synthetic construct
VGGPGPVAAAERSAP

SEQ ID NO: 305 - protein, 15 aa, synthetic construct
VGGPPQALGLCLVQR

SEQ ID NO: 306 - protein, 15 aa, synthetic construct
VGGSVPGLAVSAAAL

SEQ ID NO: 307 - protein, 15 aa, synthetic construct
VGGTGPGLGPGGPAV

SEQ ID NO: 308 - protein, 15 aa, synthetic construct
VGGVLGGTVGSSRRL

SEQ ID NO: 309 - protein, 15 aa, synthetic construct
VGHAAAALRRGLAPG

SEQ ID NO: 310 - protein, 15 aa, synthetic construct
VGHDQELAVRKRRDV

SEQ ID NO: 311 - protein, 15 aa, synthetic construct
VGLEQPDPGCVDAGA

SEQ ID NO: 312 - protein, 15 aa, synthetic construct
VGLPAPPGRHPAVPS

SEQ ID NO: 313 - protein, 15 aa, synthetic construct
VGLRHAHVQERGPGV

SEQ ID NO: 314 - protein, 15 aa, synthetic construct
VGLWDPSAGPAPAAA

SEQ ID NO: 315 - protein, 15 aa, synthetic construct
VGNLVKTVDCLTQNG

SEQ ID NO: 316 - protein, 15 aa, synthetic construct
VGPQPPHSGPAHGSA

SEQ ID NO: 317 - protein, 15 aa, synthetic construct
VGPQRRPGDAGGGGS

SEQ ID NO: 318 - protein, 15 aa, synthetic construct
VGPVGPGGDPQPGQG

SEQ ID NO: 319 - protein, 15 aa, synthetic construct
VGQEGRIEENTSGKR

SEQ ID NO: 320 - protein, 15 aa, synthetic construct
VGQGAAQEAGAAAPG

SEQ ID NO: 321 - protein, 15 aa, synthetic construct
VGQLCAGACDPRGGL

SEQ ID NO: 322 - protein, 15 aa, synthetic construct
VGQVGSSRDEEPGQR

SEQ ID NO: 323 - protein, 15 aa, synthetic construct
VGRGDGADPPGGPLL

SEQ ID NO: 324 - protein, 15 aa, synthetic construct
VGRPHRDGMYGTAEC

SEQ ID NO: 325 - protein, 15 aa, synthetic construct
VGSEGRTDPEAAERA

SEQ ID NO: 326 - protein, 15 aa, synthetic construct
VGVEAPGQAARPEHG

SEQ ID NO: 327 - protein, 15 aa, synthetic construct
VGVLPPGPEEADGEP

SEQ ID NO: 328 - protein, 15 aa, synthetic construct
VGWECGTPQNVFQWH

SEQ ID NO: 329 - protein, 15 aa, synthetic construct
VGWWAAAGDRHANSC

SEQ ID NO: 330 - protein, 15 aa, synthetic construct
VGYDRPCPAGPGQAG

SEQ ID NO: 331 - protein, 15 aa, synthetic construct
VHCGPGKPRLGQETL

SEQ ID NO: 332 - protein, 15 aa, synthetic construct
VHGAGGDLPGALPGP

SEQ ID NO: 333 - protein, 15 aa, synthetic construct
VHGGTAVPPPGPGCW

SEQ ID NO: 334 - protein, 15 aa, synthetic construct
VHGPGDHGHRAGRAG

SEQ ID NO: 335 - protein, 15 aa, synthetic construct
VHVEPRGRARAAGGA

SEQ ID NO: 336 - protein, 15 aa, synthetic construct
VISQSGQEADGHGRG

SEQ ID NO: 337 - protein, 15 aa, synthetic construct
VLAASSGCGASSRPT

SEQ ID NO: 338 - protein, 15 aa, synthetic construct
VLAGGFSGTEEPAGR

SEQ ID NO: 339 - protein, 15 aa, synthetic construct
VLCGFPGARERGPRD

SEQ ID NO: 340 - protein, 15 aa, synthetic construct
VLDARNAGAGGLAGP

SEQ ID NO: 341 - protein, 15 aa, synthetic construct
VLDGARHHPGLLQPP

SEQ ID NO: 342 - protein, 15 aa, synthetic construct
VLEEGFADPRRPSGS

SEQ ID NO: 343 - protein, 15 aa, synthetic construct
VLEKGFADPRRPSGS

SEQ ID NO: 344 - protein, 15 aa, synthetic construct
VLGEPQRRPRLLGRR

SEQ ID NO: 345 - protein, 15 aa, synthetic construct
VLGGGGQGVGRLRAP

SEQ ID NO: 346 - protein, 15 aa, synthetic construct
VLGGPGGGGLPGGGG

SEQ ID NO: 347 - protein, 15 aa, synthetic construct
VLGGQGRRHRRGHWR

SEQ ID NO: 348 - protein, 15 aa, synthetic construct
VLGPEPRAPYLAMLA

SEQ ID NO: 349 - protein, 15 aa, synthetic construct
VLGPGPAAVAGLRAG

SEQ ID NO: 350 - protein, 15 aa, synthetic construct
VLGRGAPRSSPTHGA

SEQ ID NO: 351 - protein, 15 aa, synthetic construct
VLGRTGAQAFPLHPG

SEQ ID NO: 352 - protein, 15 aa, synthetic construct
VLGSFTYHRPLSDSG

SEQ ID NO: 353 - protein, 15 aa, synthetic construct
VLGVGGSYSDVCFFP

SEQ ID NO: 354 - protein, 15 aa, synthetic construct
VLGVPGERGGGSKCS

SEQ ID NO: 355 - protein, 15 aa, synthetic construct
VLHDVGPHLPGPLAS

SEQ ID NO: 356 - protein, 15 aa, synthetic construct
VLHLRREFSLSDVHE

SEQ ID NO: 357 - protein, 15 aa, synthetic construct
VLQCDPDWARALGLP

SEQ ID NO: 358 - protein, 15 aa, synthetic construct
VLQEAARGREEVHPE

SEQ ID NO: 359 - protein, 15 aa, synthetic construct
VLQEETRAHENPFHL

SEQ ID NO: 360 - protein, 15 aa, synthetic construct
VLQGQGENVHPGGAC

SEQ ID NO: 361 - protein, 15 aa, synthetic construct
VLQLWPAQPELPHQL

SEQ ID NO: 362 - protein, 15 aa, synthetic construct
VLQPAHPRAQRCGPA

SEQ ID NO: 363 - protein, 15 aa, synthetic construct
VLQTELGRAHARRRP

SEQ ID NO: 364 - protein, 15 aa, synthetic construct
VLSAPAPNSDLDSYP

SEQ ID NO: 365 - protein, 15 aa, synthetic construct
VLSGCFLGRVLLGLR

SEQ ID NO: 366 - protein, 15 aa, synthetic construct
VLSGGGEDLPRRESG

SEQ ID NO: 367 - protein, 15 aa, synthetic construct
VLSGVVPSSTASGSS

SEQ ID NO: 368 - protein, 15 aa, synthetic construct
VMAGGIMMGPNTVGS

SEQ ID NO: 369 - protein, 15 aa, synthetic construct
VMVGRPAGGTGILRG

SEQ ID NO: 370 - protein, 15 aa, synthetic construct
VPEGRGPDPGPGGCR

SEQ ID NO: 371 - protein, 15 aa, synthetic construct
VPPDHLCGLQLPGPV

SEQ ID NO: 372 - protein, 15 aa, synthetic construct
VPPGDRYPSAGPGAP

SEQ ID NO: 373 - protein, 15 aa, synthetic construct
VPPPADPAGGPKWRR

SEQ ID NO: 374 - protein, 15 aa, synthetic construct
VPVPPAPRPRPPGRV

SEQ ID NO: 375 - protein, 15 aa, synthetic construct
VQAAGAAGPRAAGCG

SEQ ID NO: 376 - protein, 15 aa, synthetic construct
VQAEQRLPAAAGSWR

SEQ ID NO: 377 - protein, 15 aa, synthetic construct
VQAGGPRQAAHERLH

SEQ ID NO: 378 - protein, 15 aa, synthetic construct
VQALESHQQGAVCRV

SEQ ID NO: 379 - protein, 15 aa, synthetic construct
VQAPEEARGGRGWGC

SEQ ID NO: 380 - protein, 15 aa, synthetic construct
VQDAGQEEELLPDHQ

SEQ ID NO: 381 - protein, 15 aa, synthetic construct
VQDQPRDSVHPHGPS

SEQ ID NO: 382 - protein, 15 aa, synthetic construct
VQEEDPQEQRGQHPR

SEQ ID NO: 383 - protein, 15 aa, synthetic construct
VQEGHEQPGQGGQGR

SEQ ID NO: 384 - protein, 15 aa, synthetic construct
VQEGPQENPAGQAPR

SEQ ID NO: 385 - protein, 15 aa, synthetic construct
VQETEAKDQRGAAAA

SEQ ID NO: 386 - protein, 15 aa, synthetic construct
VQGADLGSGVWCRRV

SEQ ID NO: 387 - protein, 15 aa, synthetic construct
VQGAEQRLPGEGVPQ

SEQ ID NO: 388 - protein, 15 aa, synthetic construct
VQGGAPRSGGDPGVP

SEQ ID NO: 389 - protein, 15 aa, synthetic construct
VQGGAVCLGSVHRPG

SEQ ID NO: 390 - protein, 15 aa, synthetic construct
VQGNGAWVRAAGGGE

SEQ ID NO: 391 - protein, 15 aa, synthetic construct
VQGSEAPHCPQAQAD

SEQ ID NO: 392 - protein, 15 aa, synthetic construct
VQHDDGDRPALARRR

SEQ ID NO: 393 - protein, 15 aa, synthetic construct
VQHDGDGAEAAGPAA

SEQ ID NO: 394 - protein, 15 aa, synthetic construct
VQLAGYGRPPEEGPR

SEQ ID NO: 395 - protein, 15 aa, synthetic construct
VQLDGAAGGRARTRW

SEQ ID NO: 396 - protein, 15 aa, synthetic construct
VQPAGAQAEVLPGPQ

SEQ ID NO: 397 - protein, 15 aa, synthetic construct
VQPDPLSAPQDLREA

SEQ ID NO: 398 - protein, 15 aa, synthetic construct
VQQGQDEKAPEEEPE

SEQ ID NO: 399 - protein, 15 aa, synthetic construct
VQQHGQDCRGPQDGG

SEQ ID NO: 400 - protein, 15 aa, synthetic construct
VQQVPGQDERHVRQD

SEQ ID NO: 401 - protein, 15 aa, synthetic construct
VQSAVNVAKFGEVLC

SEQ ID NO: 402 - protein, 15 aa, synthetic construct
VQSDGQLLRLVQAVA

SEQ ID NO: 403 - protein, 15 aa, synthetic construct
VQSGAQDPSLRLLLP

SEQ ID NO: 404 - protein, 15 aa, synthetic construct
VQSPGDPALPAARVG

SEQ ID NO: 405 - protein, 15 aa, synthetic construct
VQVGDCPLGREVARD

SEQ ID NO: 406 - protein, 15 aa, synthetic construct
VQVKDPSGPEPGQCQ

SEQ ID NO: 407 - protein, 15 aa, synthetic construct
VQVPDGVPGHSPGLH

SEQ ID NO: 408 - protein, 15 aa, synthetic construct
VQWGGRRPRGFPEAG

SEQ ID NO: 409 - protein, 15 aa, synthetic construct
VRAGGEDLRGQGAAA

SEQ ID NO: 410 - protein, 15 aa, synthetic construct
VRARPPGRRAAAGAV

SEQ ID NO: 411 - protein, 15 aa, synthetic construct
VRCGGRGRHRFPLAE

SEQ ID NO: 412 - protein, 15 aa, synthetic construct
VRDGKTSECFLDLPA

SEQ ID NO: 413 - protein, 15 aa, synthetic construct
VREGQADAPGEGDPG

SEQ ID NO: 414 - protein, 15 aa, synthetic construct
VREGSVDCAGGNRHA

SEQ ID NO: 415 - protein, 15 aa, synthetic construct
VREHGRAQAPGHDQP

SEQ ID NO: 416 - protein, 15 aa, synthetic construct
VRPPGRASAAGGRAG

SEQ ID NO: 417 - protein, 15 aa, synthetic construct
VSAAAQPAAISTATT

SEQ ID NO: 418 - protein, 15 aa, synthetic construct
VSAAGALAVPQLPVL

SEQ ID NO: 419 - protein, 15 aa, synthetic construct
VSAAGGPRRAAGAAR

SEQ ID NO: 420 - protein, 15 aa, synthetic construct
VSAGARLRARPGNHC

SEQ ID NO: 421 - protein, 15 aa, synthetic construct
VSAHTRLSCPGWSPT

SEQ ID NO: 422 - protein, 15 aa, synthetic construct
VSAHYRKWRHFDYQL

SEQ ID NO: 423 - protein, 15 aa, synthetic construct
VSAQAGQAPAPQVGR

SEQ ID NO: 424 - protein, 15 aa, synthetic construct
VSCGRTSSGWRRGQR

SEQ ID NO: 425 - protein, 15 aa, synthetic construct
VSCHCQAQAIFLHQK

SEQ ID NO: 426 - protein, 15 aa, synthetic construct
VSCSSSSLLMDIMGL

SEQ ID NO: 427 - protein, 15 aa, synthetic construct
VSDAAALQFARSADA

SEQ ID NO: 428 - protein, 15 aa, synthetic construct
VSDEEALGDHRPQLV

SEQ ID NO: 429 - protein, 15 aa, synthetic construct
VSDRIPHAGADRPEQ

SEQ ID NO: 430 - protein, 15 aa, synthetic construct
VSEERRAAARGPRRG

SEQ ID NO: 431 - protein, 15 aa, synthetic construct
VSEHFYCRKRCGSKY

SEQ ID NO: 432 - protein, 15 aa, synthetic construct
VSEKKDRKKTGRHRN

SEQ ID NO: 433 - protein, 15 aa, synthetic construct
VSELGHGRQPRAAPR

SEQ ID NO: 434 - protein, 15 aa, synthetic construct
VSEMDVSLSADAAQL

SEQ ID NO: 435 - protein, 15 aa, synthetic construct
VSEMDVSLSADTAQL

SEQ ID NO: 436 - protein, 15 aa, synthetic construct
VSFSGAAVGSWGWEY

SEQ ID NO: 437 - protein, 15 aa, synthetic construct
VSGASCLPGRAHQNR

SEQ ID NO: 438 - protein, 15 aa, synthetic construct
VSGASVQGDEGRGGC

SEQ ID NO: 439 - protein, 15 aa, synthetic construct
VSGEAHVLPAGAEQD

SEQ ID NO: 440 - protein, 15 aa, synthetic construct
VSGGGNGGHPAERIP

SEQ ID NO: 441 - protein, 15 aa, synthetic construct
VSGHGAEEPPQYPGC

SEQ ID NO: 442 - protein, 15 aa, synthetic construct
VSGKPEFAPPPPPRC

SEQ ID NO: 443 - protein, 15 aa, synthetic construct
VSGLPLRTSAQPLLP

SEQ ID NO: 444 - protein, 15 aa, synthetic construct
VSGLVGVSDLTGASG

SEQ ID NO: 445 - protein, 15 aa, synthetic construct
VSGPGGGAEPGLGHS

SEQ ID NO: 446 - protein, 15 aa, synthetic construct
VSGPLQGTGRLQGGT

SEQ ID NO: 447 - protein, 15 aa, synthetic construct
VSGSHEEGSGEGSWA

SEQ ID NO: 448 - protein, 15 aa, synthetic construct
VSGSVPESWRWRWWL

SEQ ID NO: 449 - protein, 15 aa, synthetic construct
VSGTYDILPFPIPFS

SEQ ID NO: 450 - protein, 15 aa, synthetic construct
VSHEALFNDHCHPYD

SEQ ID NO: 451 - protein, 15 aa, synthetic construct
VSLPELCSCNLHFRN

SEQ ID NO: 452 - protein, 15 aa, synthetic construct
VSQGRAGQGDPEGLQ

SEQ ID NO: 453 - protein, 15 aa, synthetic construct
VSQKGLSAPFAKLSH

SEQ ID NO: 454 - protein, 15 aa, synthetic construct
VSQLPSDSRNTRARC

SEQ ID NO: 455 - protein, 15 aa, synthetic construct
VSQSSRDPRRCHTGR

SEQ ID NO: 456 - protein, 15 aa, synthetic construct
VSQVQGEPLLVLSSR

SEQ ID NO: 457 - protein, 15 aa, synthetic construct
VSRDGRAHPNQVAED

SEQ ID NO: 458 - protein, 15 aa, synthetic construct
VSSAPGRRRLAAGPA

SEQ ID NO: 459 - protein, 15 aa, synthetic construct
VSSECAAGWPGVPRK

SEQ ID NO: 460 - protein, 15 aa, synthetic construct
VSSVPGPPRRRGAPA

SEQ ID NO: 461 - protein, 15 aa, synthetic construct
VSTEPTVRPPGTAAR

SEQ ID NO: 462 - protein, 15 aa, synthetic construct
VSTHFSKRKGRSCSL

SEQ ID NO: 463 - protein, 15 aa, synthetic construct
VSTSYSRATAPLAGR

SEQ ID NO: 464 - protein, 15 aa, synthetic construct
VSVGEAALPGELHLP

SEQ ID NO: 465 - protein, 15 aa, synthetic construct
VSVSLRGDAPAHGKC

SEQ ID NO: 466 - protein, 15 aa, synthetic construct
VTAAQHRRVTAELLE

SEQ ID NO: 467 - protein, 15 aa, synthetic construct
VTCTHSCRVHALRCP

SEQ ID NO: 468 - protein, 15 aa, synthetic construct
VTDPSWGRGGSGPGL

SEQ ID NO: 469 - protein, 15 aa, synthetic construct
VTEEGQRATSHARGG

SEQ ID NO: 470 - protein, 15 aa, synthetic construct
VTERSSSGWLPPGAA

SEQ ID NO: 471 - protein, 15 aa, synthetic construct
VTGAGPTAASPPLHP

SEQ ID NO: 472 - protein, 15 aa, synthetic construct
VTGAPAAGPGDASGH

SEQ ID NO: 473 - protein, 15 aa, synthetic construct
VTGGAAGIHSGLPRG

SEQ ID NO: 474 - protein, 15 aa, synthetic construct
VTGLGPGAPSARLRA

SEQ ID NO: 475 - protein, 15 aa, synthetic construct
VTGRGPVTRGCAAAR

SEQ ID NO: 476 - protein, 15 aa, synthetic construct
VTGRNCSPSSLRRSP

SEQ ID NO: 477 - protein, 15 aa, synthetic construct
VTQDRRLFVITSLWL

SEQ ID NO: 478 - protein, 15 aa, synthetic construct
VTQQLVGEEEAARQA

SEQ ID NO: 479 - protein, 15 aa, synthetic construct
VTTCATQHPHVAFPT

SEQ ID NO: 480 - protein, 15 aa, synthetic construct
VTVEPTVREGVREAV

SEQ ID NO: 481 - protein, 15 aa, synthetic construct
VVAAGAAVDLERGSG

SEQ ID NO: 482 - protein, 15 aa, synthetic construct
VVDEKPQQHGVASQP

SEQ ID NO: 483 - protein, 15 aa, synthetic construct
VVEHGHAQLCHAGRA

SEQ ID NO: 484 - protein, 15 aa, synthetic construct
VVEPGCRHAGCGPGR

SEQ ID NO: 485 - protein, 15 aa, synthetic construct
VVEPKAHDALLRVRH

SEQ ID NO: 486 - protein, 15 aa, synthetic construct
VVERFDETETLVEER

SEQ ID NO: 487 - protein, 15 aa, synthetic construct
VVEVMGQGGRSRAGL

SEQ ID NO: 488 - protein, 15 aa, synthetic construct
VVGAAPEGRCPCGLT

SEQ ID NO: 489 - protein, 15 aa, synthetic construct
VVGGGQERGAAAAAA

SEQ ID NO: 490 - protein, 15 aa, synthetic construct
VVGGPGPEFQHCPPE

SEQ ID NO: 491 - protein, 15 aa, synthetic construct
VVHPAFHSPDREAPA

SEQ ID NO: 492 - protein, 15 aa, synthetic construct
VVPEEEMDDQSPAPV

SEQ ID NO: 493 - protein, 15 aa, synthetic construct
VVPGVDPEPPRQPAW

SEQ ID NO: 494 - protein, 15 aa, synthetic construct
VVQLHQHHGGGGGAA

SEQ ID NO: 495 - protein, 15 aa, synthetic construct
VVQSSSSPPRHLIDP

SEQ ID NO: 496 - protein, 15 aa, synthetic construct
VVSGAVAAAGRGPAL

SEQ ID NO: 497 - protein, 15 aa, synthetic construct
VWAGPIRAPGQQQER

SEQ ID NO: 498 - protein, 15 aa, synthetic construct
VWCSIQNGHHCCLHR

SEQ ID NO: 499 - protein, 15 aa, synthetic construct
VWDSGEYSARGDDHE

SEQ ID NO: 500 - protein, 15 aa, synthetic construct
VWEPFLDSPGREGER

SEQ ID NO: 501 - protein, 15 aa, synthetic construct
VWESERGGSIPAESA

SEQ ID NO: 502 - protein, 15 aa, synthetic construct
VWGPALRGERSARLA

SEQ ID NO: 503 - protein, 15 aa, synthetic construct
VWNEEKPSQPRELRP

SEQ ID NO: 504 - protein, 15 aa, synthetic construct
VWPGGLQEDLHWRGQ

SEQ ID NO: 505 - protein, 15 aa, synthetic construct
VWQVPAAAAGGGEPA

SEQ ID NO: 506 - protein, 15 aa, synthetic construct
VWVEVPHLCQLFADH

SEQ ID NO: 507 - protein, 15 aa, synthetic construct
WAGPQPGPSGLAAHV

SEQ ID NO: 508 - protein, 15 aa, synthetic construct
WLVMPLLPAPCRPFR

SEQ ID NO: 509 - protein, 15 aa, synthetic construct
WPLRPGRSGFRGCSL

SEQ ID NO: 510 - protein, 15 aa, synthetic construct
WRTTRRRPPRPRCGA

SEQ ID NO: 511 - protein, 15 aa, synthetic construct
WTTRRRRTGSGKSAR

SEQ ID NO: 512 - protein, 15 aa, synthetic construct
AAGLRDFRYLLRSDR

SEQ ID NO: 513 - protein, 15 aa, synthetic construct
AFRGPRATPPAAGGT

SEQ ID NO: 514 - protein, 15 aa, synthetic construct
AGAGRAGAGRGRRGG

SEQ ID NO: 515 - protein, 15 aa, synthetic construct
AGGAAARRPGGQHYQ

SEQ ID NO: 516 - protein, 15 aa, synthetic construct
AGGAAGGGARAPREE

SEQ ID NO: 517 - protein, 15 aa, synthetic construct
AGGAGVRGARRQGSR

SEQ ID NO: 518 - protein, 15 aa, synthetic construct
ALLAGRRLAGAGRVA

SEQ ID NO: 519 - protein, 15 aa, synthetic construct
AMEAWAVAMAVAMVA

SEQ ID NO: 520 - protein, 15 aa, synthetic construct
APAAPERAAPHAQPH

SEQ ID NO: 521 - protein, 15 aa, synthetic construct
APAAPPRDAPAAPGA

SEQ ID NO: 522 - protein, 15 aa, synthetic construct
APAAVRRPAATLGAA

SEQ ID NO: 523 - protein, 15 aa, synthetic construct
APAGLRASHGRRELL

SEQ ID NO: 524 - protein, 15 aa, synthetic construct
APAGPRPAHQVRPQR

SEQ ID NO: 525 - protein, 15 aa, synthetic construct
APAGRRRRKLSRGEA

SEQ ID NO: 526 - protein, 15 aa, synthetic construct
APAHRARRCHGHQRP

SEQ ID NO: 527 - protein, 15 aa, synthetic construct
APALRGRAGQQAGAA

SEQ ID NO: 528 - protein, 15 aa, synthetic construct
APAPARARPPGSPSA

SEQ ID NO: 529 - protein, 15 aa, synthetic construct
APAPARSSRSRGSPA

SEQ ID NO: 530 - protein, 15 aa, synthetic construct
APAPGRAALRGRAHL

SEQ ID NO: 531 - protein, 15 aa, synthetic construct
APAPRAAGQGRPARR

SEQ ID NO: 532 - protein, 15 aa, synthetic construct
APAPREPARGPRRGP

SEQ ID NO: 533 - protein, 15 aa, synthetic construct
APAPRRAWTRAAATM

SEQ ID NO: 534 - protein, 15 aa, synthetic construct
APAQPARGGRAPAGD

SEQ ID NO: 535 - protein, 15 aa, synthetic construct
APAQRPLRASSAGTP

SEQ ID NO: 536 - protein, 15 aa, synthetic construct
APARAARLPAAPRPA

SEQ ID NO: 537 - protein, 15 aa, synthetic construct
APARRPGAGPRALHA

SEQ ID NO: 538 - protein, 15 aa, synthetic construct
APARRSSRGSPSASA

SEQ ID NO: 539 - protein, 15 aa, synthetic construct
APASRAPTPAPTRLT

SEQ ID NO: 540 - protein, 15 aa, synthetic construct
APASRRATTTRRTRC

SEQ ID NO: 541 - protein, 15 aa, synthetic construct
APCRPRAAARDPPVP

SEQ ID NO: 542 - protein, 15 aa, synthetic construct
APGRAARAPAAVAGP

SEQ ID NO: 543 - protein, 15 aa, synthetic construct
APLGKRGALSRVSSV

SEQ ID NO: 544 - protein, 15 aa, synthetic construct
APLRGPAAPRALPQA

SEQ ID NO: 545 - protein, 15 aa, synthetic construct
APLRSVTPPELPQVR

SEQ ID NO: 546 - protein, 15 aa, synthetic construct
APMRRGRQARGAPRP

SEQ ID NO: 547 - protein, 15 aa, synthetic construct
APRPRRAPSTPTTGR

SEQ ID NO: 548 - protein, 15 aa, synthetic construct
APRPRRGLEERGPMV

SEQ ID NO: 549 - protein, 15 aa, synthetic construct
APRRARATRPHGAPG

SEQ ID NO: 550 - protein, 15 aa, synthetic construct
APRRRGALDPLRPGR

SEQ ID NO: 551 - protein, 15 aa, synthetic construct
APSRRAAAAGPPAAE

SEQ ID NO: 552 - protein, 15 aa, synthetic construct
APTAAPRPAAAPGRH

SEQ ID NO: 553 - protein, 15 aa, synthetic construct
APTPPRRRTTSWCCG

SEQ ID NO: 554 - protein, 15 aa, synthetic construct
APTRARRPSRRRRPP

SEQ ID NO: 555 - protein, 15 aa, synthetic construct
APTRCARAGTSPAPS

SEQ ID NO: 556 - protein, 15 aa, synthetic construct
APVGAPRGTVAPVGA

SEQ ID NO: 557 - protein, 15 aa, synthetic construct
APVLRPVPAQTPAEE

SEQ ID NO: 558 - protein, 15 aa, synthetic construct
APVPRGPRRPWRAGL

SEQ ID NO: 559 - protein, 15 aa, synthetic construct
AQLAVRRPGAQRQRR

SEQ ID NO: 560 - protein, 15 aa, synthetic construct
ARVQDRAPRGLRPGD

SEQ ID NO: 561 - protein, 15 aa, synthetic construct
AYARLGGSSGSGVAI

SEQ ID NO: 562 - protein, 15 aa, synthetic construct
CARMASYFPNTPLNR

SEQ ID NO: 563 - protein, 15 aa, synthetic construct
CWETTAVSLKTKPGP

SEQ ID NO: 564 - protein, 15 aa, synthetic construct
GAGGGPAEAGAAAEE

SEQ ID NO: 565 - protein, 15 aa, synthetic construct
GAGGGPAEAGAAAQE

SEQ ID NO: 566 - protein, 15 aa, synthetic construct
GGAGPGAGPEACRGE

SEQ ID NO: 567 - protein, 15 aa, synthetic construct
GGPGAELPPALGRGG

SEQ ID NO: 568 - protein, 15 aa, synthetic construct
GGVPALLQPPVQGEW

SEQ ID NO: 569 - protein, 15 aa, synthetic construct
GILSGPAHGAAAGLR

SEQ ID NO: 570 - protein, 15 aa, synthetic construct
GQRRAERPAAGEGER

SEQ ID NO: 571 - protein, 15 aa, synthetic construct
GSGGAAPSPAALVQP

SEQ ID NO: 572 - protein, 15 aa, synthetic construct
GSGGEGPSELFCGIR

SEQ ID NO: 573 - protein, 15 aa, synthetic construct
GWDHQHPPGHLRGGR

SEQ ID NO: 574 - protein, 15 aa, synthetic construct
QQSPSPQAHAAPLVA

SEQ ID NO: 575 - protein, 15 aa, synthetic construct
RPRPRAGAGERPAPA

SEQ ID NO: 576 - protein, 15 aa, synthetic construct
SGVGGIQFGSAPHPP

SEQ ID NO: 577 - protein, 15 aa, synthetic construct
SQRKTTRRKRAIGRG

SEQ ID NO: 578 - protein, 15 aa, synthetic construct
SSPPRSPTCAARRRS

SEQ ID NO: 579 - protein, 15 aa, synthetic construct
TAASTRGRRTSPSRP

SEQ ID NO: 580 - protein, 15 aa, synthetic construct
VPAKGTGTGHESRPG

SEQ ID NO: 581 - protein, 15 aa, synthetic construct
VPDRKDEHSGRAEFW

SEQ ID NO: 582 - protein, 15 aa, synthetic construct
VPEDAPVRRRAGLAR

SEQ ID NO: 583 - protein, 15 aa, synthetic construct
VPHSQAAPGPEMQSE

SEQ ID NO: 584 - protein, 15 aa, synthetic construct
VPVPQRRVVRQGAAR

SEQ ID NO: 585 - protein, 15 aa, synthetic construct
WGEKRAACSRGRLGP

SEQ ID NO: 586 - protein, 15 aa, synthetic construct
WGEPGAGARAGGRRH

SEQ ID NO: 587 - protein, 15 aa, synthetic construct
WPLPCCTLEANRPPA

SEQ ID NO: 588 - protein, 15 aa, synthetic construct
WPPARASTSRTPRST

SEQ ID NO: 589 - protein, 15 aa, synthetic construct
WRPLWVPTPTTGRTG

SEQ ID NO: 590 - protein, 15 aa, synthetic construct
AAAAAAAGPRRPGPA

SEQ ID NO: 591 - protein, 15 aa, synthetic construct
AAAAHRAPGAGGGRR

SEQ ID NO: 592 - protein, 15 aa, synthetic construct
AAAALVQGALHRGRA

SEQ ID NO: 593 - protein, 15 aa, synthetic construct
AAAGAGGGDRPHGRA

SEQ ID NO: 594 - protein, 15 aa, synthetic construct
AAAGGAAVRCRRGLA

SEQ ID NO: 595 - protein, 15 aa, synthetic construct
AAAGGTRQEGGGGGG

SEQ ID NO: 596 - protein, 15 aa, synthetic construct
AAAGRGPAALRAGAA

SEQ ID NO: 597 - protein, 15 aa, synthetic construct
AAAPGMVPLALWPVA

SEQ ID NO: 598 - protein, 15 aa, synthetic construct
AAAPVAGLGGRRAHT

SEQ ID NO: 599 - protein, 15 aa, synthetic construct
AAARRGPRPRPMGAP

SEQ ID NO: 600 - protein, 15 aa, synthetic construct
AAATAAAAAAAACAA

SEQ ID NO: 601 - protein, 15 aa, synthetic construct
AAATASRPGAALEPA

SEQ ID NO: 602 - protein, 15 aa, synthetic construct
AAATSRPLWRLGCPG

SEQ ID NO: 603 - protein, 15 aa, synthetic construct
AAATTAAAGDRGPGA

SEQ ID NO: 604 - protein, 15 aa, synthetic construct
AAAWGAPPWGCGCPG

SEQ ID NO: 605 - protein, 15 aa, synthetic construct
AAAWSPRGSLPLPSA

SEQ ID NO: 606 - protein, 15 aa, synthetic construct
AACPRHPARHPAAPA

SEQ ID NO: 607 - protein, 15 aa, synthetic construct
AAGAAALRVLQRGEQ

SEQ ID NO: 608 - protein, 15 aa, synthetic construct
AAGAGAVSRALGGRA

SEQ ID NO: 609 - protein, 15 aa, synthetic construct
AAGAGGAHPRAGELG

SEQ ID NO: 610 - protein, 15 aa, synthetic construct
AAGEDPAAGRGRERQ

SEQ ID NO: 611 - protein, 15 aa, synthetic construct
AAGGAGAAAGAAATA

SEQ ID NO: 612 - protein, 15 aa, synthetic construct
AAGGGERDAPAQPPL

SEQ ID NO: 613 - protein, 15 aa, synthetic construct
AAGGPGGGAGGRGRP

SEQ ID NO: 614 - protein, 15 aa, synthetic construct
AAGGSTNRGLTPGGR

SEQ ID NO: 615 - protein, 15 aa, synthetic construct
AAGLGAPACVRRSIQ

SEQ ID NO: 616 - protein, 15 aa, synthetic construct
AAGLQTVPGAQRGLH

SEQ ID NO: 617 - protein, 15 aa, synthetic construct
AAGPGAAVRLPPGAL

SEQ ID NO: 618 - protein, 15 aa, synthetic construct
AAGPGRSPGTWWTPW

SEQ ID NO: 619 - protein, 15 aa, synthetic construct
AAGPWLAAAALPRLA

SEQ ID NO: 620 - protein, 15 aa, synthetic construct
AAGRAGGQAQRDPAD

SEQ ID NO: 621 - protein, 15 aa, synthetic construct
AAGREDAPRTASRRS

SEQ ID NO: 622 - protein, 15 aa, synthetic construct
AAGRGGLPGSAAPPA

SEQ ID NO: 623 - protein, 15 aa, synthetic construct
AALFPRQEALRPQSE

SEQ ID NO: 624 - protein, 15 aa, synthetic construct
AALPGFPAASPPAAR

SEQ ID NO: 625 - protein, 15 aa, synthetic construct
AAPALRADRTGPAPR

SEQ ID NO: 626 - protein, 15 aa, synthetic construct
AAPEERGGVRGQRRA

SEQ ID NO: 627 - protein, 15 aa, synthetic construct
AAPRAGHVVAAAGRD

SEQ ID NO: 628 - protein, 15 aa, synthetic construct
AAPRAQQRPPTAGAQ

SEQ ID NO: 629 - protein, 15 aa, synthetic construct
AAQAAGHQGGSQERT

SEQ ID NO: 630 - protein, 15 aa, synthetic construct
AAQLGPRRGAAPGDS

SEQ ID NO: 631 - protein, 15 aa, synthetic construct
AAQPVEARGRLWAGS

SEQ ID NO: 632 - protein, 15 aa, synthetic construct
AARAAHEGAPGLQVP

SEQ ID NO: 633 - protein, 15 aa, synthetic construct
AARAHGDRAQQGVLS

SEQ ID NO: 634 - protein, 15 aa, synthetic construct
AARAPGLGFGRWADP

SEQ ID NO: 635 - protein, 15 aa, synthetic construct
AARDAAAAGGPWGRR

SEQ ID NO: 636 - protein, 15 aa, synthetic construct
AARDAGHAAGAPGSQ

SEQ ID NO: 637 - protein, 15 aa, synthetic construct
AARLLQAGPAAGGAR

SEQ ID NO: 638 - protein, 15 aa, synthetic construct
AARPDCAVAAPGLGP

SEQ ID NO: 639 - protein, 15 aa, synthetic construct
AARVGVPAAVRVPPA

SEQ ID NO: 640 - protein, 15 aa, synthetic construct
AARVNVAVAAARDSP

SEQ ID NO: 641 - protein, 15 aa, synthetic construct
AASASTVAAGGGRGA

SEQ ID NO: 642 - protein, 15 aa, synthetic construct
AASGGVACLGAPWLL

SEQ ID NO: 643 - protein, 15 aa, synthetic construct
AASLLSPVGWPRGPG

SEQ ID NO: 644 - protein, 15 aa, synthetic construct
AATASASGASPSSAR

SEQ ID NO: 645 - protein, 15 aa, synthetic construct
AAVAAPAAAALRPRG

SEQ ID NO: 646 - protein, 15 aa, synthetic construct
AAWAAVLGAAPAGAG

SEQ ID NO: 647 - protein, 15 aa, synthetic construct
AAWPKTACSSLSART

SEQ ID NO: 648 - protein, 15 aa, synthetic construct
ACARFCSKAETWSAW

SEQ ID NO: 649 - protein, 15 aa, synthetic construct
ACCRGWELEGLARCT

SEQ ID NO: 650 - protein, 15 aa, synthetic construct
ACLSPRPASRRPPPQ

SEQ ID NO: 651 - protein, 15 aa, synthetic construct
ACPRASAQAHGASYS

SEQ ID NO: 652 - protein, 15 aa, synthetic construct
ACSGRSGAGAGGGSP

SEQ ID NO: 653 - protein, 15 aa, synthetic construct
ADAPGPRGAGAGRGA

SEQ ID NO: 654 - protein, 15 aa, synthetic construct
ADLRGPSRVPEPPRG

SEQ ID NO: 655 - protein, 15 aa, synthetic construct
ADSARKVLNCKVCCP

SEQ ID NO: 656 - protein, 15 aa, synthetic construct
ADVVWGAARPRASEE

SEQ ID NO: 657 - protein, 15 aa, synthetic construct
AEPRQGRWGWRRDSP

SEQ ID NO: 658 - protein, 15 aa, synthetic construct
AEQDRGAPGRRHGRA

SEQ ID NO: 659 - protein, 15 aa, synthetic construct
AEQGAAGRRPVALRG

SEQ ID NO: 660 - protein, 15 aa, synthetic construct
AERLLPAGRRGVHHP

SEQ ID NO: 661 - protein, 15 aa, synthetic construct
AERPFPVFPGPQVAA

SEQ ID NO: 662 - protein, 15 aa, synthetic construct
AERSPEPGCLAQLPR

SEQ ID NO: 663 - protein, 15 aa, synthetic construct
AERVQAAVRVPGQEP

SEQ ID NO: 664 - protein, 15 aa, synthetic construct
AESPGHARRGCGHEG

SEQ ID NO: 665 - protein, 15 aa, synthetic construct
AESQSLHSDPIHPRR

SEQ ID NO: 666 - protein, 15 aa, synthetic construct
AEYNLSHRISPLGSD

SEQ ID NO: 667 - protein, 15 aa, synthetic construct
AFPPTQKSKSHSSLF

SEQ ID NO: 668 - protein, 15 aa, synthetic construct
AFQARSLDRQRREQQ

SEQ ID NO: 669 - protein, 15 aa, synthetic construct
AGAAARVGGAGRPGP

SEQ ID NO: 670 - protein, 15 aa, synthetic construct
AGAARFSSPGIVQAR

SEQ ID NO: 671 - protein, 15 aa, synthetic construct
AGAHLPPAGLVPFAL

SEQ ID NO: 672 - protein, 15 aa, synthetic construct
AGAQPQAGQHRGALQ

SEQ ID NO: 673 - protein, 15 aa, synthetic construct
AGARGLPPGHLPRAL

SEQ ID NO: 674 - protein, 15 aa, synthetic construct
AGASVCWTAAPWRTC

SEQ ID NO: 675 - protein, 15 aa, synthetic construct
AGATAAGEPGTGRGS

SEQ ID NO: 676 - protein, 15 aa, synthetic construct
AGDAASPGRRLQLLP

SEQ ID NO: 677 - protein, 15 aa, synthetic construct
AGGGAGTGVLWIPRP

SEQ ID NO: 678 - protein, 15 aa, synthetic construct
AGGGGGGGGGAAPGG

SEQ ID NO: 679 - protein, 15 aa, synthetic construct
AGGGGGGGRADGRAG

SEQ ID NO: 680 - protein, 15 aa, synthetic construct
AGGGGGRAPGGAGGA

SEQ ID NO: 681 - protein, 15 aa, synthetic construct
AGGGRGAGLPGGPRG

SEQ ID NO: 682 - protein, 15 aa, synthetic construct
AGGGRGRAAGGDAGA

SEQ ID NO: 683 - protein, 15 aa, synthetic construct
AGGQPGPPGPVPVVP

SEQ ID NO: 684 - protein, 15 aa, synthetic construct
AGGRNGGASLPGSAS

SEQ ID NO: 685 - protein, 15 aa, synthetic construct
AGGRWEPRGPRDAAP

SEQ ID NO: 686 - protein, 15 aa, synthetic construct
AGLGGARSGAPGALP

SEQ ID NO: 687 - protein, 15 aa, synthetic construct
AGLRGTSPRLEAELC

SEQ ID NO: 688 - protein, 15 aa, synthetic construct
AGPALPFLRDSMGGW

SEQ ID NO: 689 - protein, 15 aa, synthetic construct
AGPARAALLPRPGAA

SEQ ID NO: 690 - protein, 15 aa, synthetic construct
AGPARGVPTRCSGLR

SEQ ID NO: 691 - protein, 15 aa, synthetic construct
AGPGAAPGRGAGLLR

SEQ ID NO: 692 - protein, 15 aa, synthetic construct
AGPGDSPPPPRSRGW

SEQ ID NO: 693 - protein, 15 aa, synthetic construct
AGPRAHNGAGESADR

SEQ ID NO: 694 - protein, 15 aa, synthetic construct
AGRGAVAARGGSGAA

SEQ ID NO: 695 - protein, 15 aa, synthetic construct
AGRPHGGGAGVPSAS

SEQ ID NO: 696 - protein, 15 aa, synthetic construct
AGSCGHCPPATTCTR

SEQ ID NO: 697 - protein, 15 aa, synthetic construct
AGSERGSVAAPGSAH

SEQ ID NO: 698 - protein, 15 aa, synthetic construct
AGSGQPVAGGAGVGA

SEQ ID NO: 699 - protein, 15 aa, synthetic construct
AGSSHPVGGARGRGA

SEQ ID NO: 700 - protein, 15 aa, synthetic construct
AGSTCRPPPTCPTGC

SEQ ID NO: 701 - protein, 15 aa, synthetic construct
AGWVPAGALAGRGLR

SEQ ID NO: 702 - protein, 15 aa, synthetic construct
AHAHRESAGCAGGHG

SEQ ID NO: 703 - protein, 15 aa, synthetic construct
AHEGPLPHPPHPAIS

SEQ ID NO: 704 - protein, 15 aa, synthetic construct
AHLAGLQTAHPHVLL

SEQ ID NO: 705 - protein, 15 aa, synthetic construct
AHPQGGRRDHGQRGQ

SEQ ID NO: 706 - protein, 15 aa, synthetic construct
AIFPITGTGAGSWTS

SEQ ID NO: 707 - protein, 15 aa, synthetic construct
ALAPGPTPLPPERVF

SEQ ID NO: 708 - protein, 15 aa, synthetic construct
ALAPSTRCHHRRCLL

SEQ ID NO: 709 - protein, 15 aa, synthetic construct
ALAPWTGSPRAAAQG

SEQ ID NO: 710 - protein, 15 aa, synthetic construct
ALCRATDTRSATLTS

SEQ ID NO: 711 - protein, 15 aa, synthetic construct
ALGQARDARVARGVL

SEQ ID NO: 712 - protein, 15 aa, synthetic construct
ALGTPVPAALRPGRL

SEQ ID NO: 713 - protein, 15 aa, synthetic construct
ALLGPLHGHLLPPPG

SEQ ID NO: 714 - protein, 15 aa, synthetic construct
ALPGAAAGRPAGGAG

SEQ ID NO: 715 - protein, 15 aa, synthetic construct
ALPPRRGGCEGSELR

SEQ ID NO: 716 - protein, 15 aa, synthetic construct
ALRPAPRVPAPRPSR

SEQ ID NO: 717 - protein, 15 aa, synthetic construct
ALVPQRAATPRQPGV

SEQ ID NO: 718 - protein, 15 aa, synthetic construct
ALWSAWPHSHGSGAA

SEQ ID NO: 719 - protein, 15 aa, synthetic construct
AMVPPRHQQPPLLPN

SEQ ID NO: 720 - protein, 15 aa, synthetic construct
ANGMVPRSCLAVPAA

SEQ ID NO: 721 - protein, 15 aa, synthetic construct
ANRPHHPAGAGRGAR

SEQ ID NO: 722 - protein, 15 aa, synthetic construct
APAAAAPRGGPWLAA

SEQ ID NO: 723 - protein, 15 aa, synthetic construct
APALGHLCPRPGLGA

SEQ ID NO: 724 - protein, 15 aa, synthetic construct
APAPAAAAAQEARRG

SEQ ID NO: 725 - protein, 15 aa, synthetic construct
APCAPHAPRTLPLRS

SEQ ID NO: 726 - protein, 15 aa, synthetic construct
APERPATWQREPAEG

SEQ ID NO: 727 - protein, 15 aa, synthetic construct
APGDRCLGIFNIWDA

SEQ ID NO: 728 - protein, 15 aa, synthetic construct
APGLAVGALPAPHPS

SEQ ID NO: 729 - protein, 15 aa, synthetic construct
APGPSPFLPLGPAEP

SEQ ID NO: 730 - protein, 15 aa, synthetic construct
APGQAALGGAPGQLQ

SEQ ID NO: 731 - protein, 15 aa, synthetic construct
APGQACLSPPWWAQR

SEQ ID NO: 732 - protein, 15 aa, synthetic construct
APGRGSAVPGHRGGQ

SEQ ID NO: 733 - protein, 15 aa, synthetic construct
APGRWSACPVTSPSA

SEQ ID NO: 734 - protein, 15 aa, synthetic construct
APLGPGPCRSPPAQA

SEQ ID NO: 735 - protein, 15 aa, synthetic construct
APLLLPTSWPAAALQ

SEQ ID NO: 736 - protein, 15 aa, synthetic construct
APLPSPGRPLWARGL

SEQ ID NO: 737 - protein, 15 aa, synthetic construct
APPAAREAALQLHRA

SEQ ID NO: 738 - protein, 15 aa, synthetic construct
APPCSPDAEPAAAGA

SEQ ID NO: 739 - protein, 15 aa, synthetic construct
APPGGRGHEPRSCAH

SEQ ID NO: 740 - protein, 15 aa, synthetic construct
APPLWSPPPCTPCTG

SEQ ID NO: 741 - protein, 15 aa, synthetic construct
APQETGSGRGQQKGG

SEQ ID NO: 742 - protein, 15 aa, synthetic construct
APQQLRAGNPGHAGR

SEQ ID NO: 743 - protein, 15 aa, synthetic construct
APRAPAPAPPARAPA

SEQ ID NO: 744 - protein, 15 aa, synthetic construct
APRHPPSDPVHLNVV

SEQ ID NO: 745 - protein, 15 aa, synthetic construct
APRSGGGRGGRAEPP

SEQ ID NO: 746 - protein, 15 aa, synthetic construct
APTSGPVYPERAPRQ

SEQ ID NO: 747 - protein, 15 aa, synthetic construct
APVLQKGGPEAEGGP

SEQ ID NO: 748 - protein, 15 aa, synthetic construct
APVPGGVQGPRRPSG

SEQ ID NO: 749 - protein, 15 aa, synthetic construct
APVPGGVQKTPGPSG

SEQ ID NO: 750 - protein, 15 aa, synthetic construct
APVPGGVQKTRGPSG

SEQ ID NO: 751 - protein, 15 aa, synthetic construct
APVPGGVQNTWGPSG

SEQ ID NO: 752 - protein, 15 aa, synthetic construct
APWVPVPAPRPASTA

SEQ ID NO: 753 - protein, 15 aa, synthetic construct
AQALPPPAELGLQRA

SEQ ID NO: 754 - protein, 15 aa, synthetic construct
AQGQELGRRTFPLRT

SEQ ID NO: 755 - protein, 15 aa, synthetic construct
AQLGDQQAPGGRVEG

SEQ ID NO: 756 - protein, 15 aa, synthetic construct
AQMEFWARLQAPEGL

SEQ ID NO: 757 - protein, 15 aa, synthetic construct
AQPGCLLVEAASAVE

SEQ ID NO: 758 - protein, 15 aa, synthetic construct
AQRCLATSPCLQPHG

SEQ ID NO: 759 - protein, 15 aa, synthetic construct
AQRQLRGPGPGGGPG

SEQ ID NO: 760 - protein, 15 aa, synthetic construct
AQTQLSEGGEPEANN

SEQ ID NO: 761 - protein, 15 aa, synthetic construct
AQVPGRDPGGGGRAR

SEQ ID NO: 762 - protein, 15 aa, synthetic construct
ARAAPPFPRGTPCSG

SEQ ID NO: 763 - protein, 15 aa, synthetic construct
ARGGAGRAPAHTCGT

SEQ ID NO: 764 - protein, 15 aa, synthetic construct
ARPEPAARPEPAARR

SEQ ID NO: 765 - protein, 15 aa, synthetic construct
ARPHPRPGADEPVRH

SEQ ID NO: 766 - protein, 15 aa, synthetic construct
ARPRLLVGWCESATC

SEQ ID NO: 767 - protein, 15 aa, synthetic construct
ARRAELRPEDATRAQ

SEQ ID NO: 768 - protein, 15 aa, synthetic construct
ARRALAPGAGAQGGC

SEQ ID NO: 769 - protein, 15 aa, synthetic construct
ARRGEPASCSSSELI

SEQ ID NO: 770 - protein, 15 aa, synthetic construct
ARRPRKASPRDTQLV

SEQ ID NO: 771 - protein, 15 aa, synthetic construct
ARSLEVAARHAPGPE

SEQ ID NO: 772 - protein, 15 aa, synthetic construct
ARWQMQHALQFGVST

SEQ ID NO: 773 - protein, 15 aa, synthetic construct
ASAAAAWSSGPAPTC

SEQ ID NO: 774 - protein, 15 aa, synthetic construct
ASAGGAGPSGRRRAR

SEQ ID NO: 775 - protein, 15 aa, synthetic construct
ASALSLWPALQQGVG

SEQ ID NO: 776 - protein, 15 aa, synthetic construct
ASAPPRPSPRQLAAP

SEQ ID NO: 777 - protein, 15 aa, synthetic construct
ASDQCLQGCGQRPWD

SEQ ID NO: 778 - protein, 15 aa, synthetic construct
ASGARLGSGAAQPPA

SEQ ID NO: 779 - protein, 15 aa, synthetic construct
ASLSTSALPARPKSA

SEQ ID NO: 780 - protein, 15 aa, synthetic construct
ASQPSPSSSCLSCSC

SEQ ID NO: 781 - protein, 15 aa, synthetic construct
ASRPIPLCNIPGWAS

SEQ ID NO: 782 - protein, 15 aa, synthetic construct
ASSASLRSNLPPQPR

SEQ ID NO: 783 - protein, 15 aa, synthetic construct
ASTTWGVPSGSPSMG

SEQ ID NO: 784 - protein, 15 aa, synthetic construct
ASVCAAGHGPRGQRE

SEQ ID NO: 785 - protein, 15 aa, synthetic construct
ASWAASATTSAPSTS

SEQ ID NO: 786 - protein, 15 aa, synthetic construct
ATAAALPRALARCEP

SEQ ID NO: 787 - protein, 15 aa, synthetic construct
ATAAATVGRPPGQPT

SEQ ID NO: 788 - protein, 15 aa, synthetic construct
ATPGGLGPSMSPPAA

SEQ ID NO: 789 - protein, 15 aa, synthetic construct
ATSVEVGLWRRCAGG

SEQ ID NO: 790 - protein, 15 aa, synthetic construct
ATSVSSTRSWRATSS

SEQ ID NO: 791 - protein, 15 aa, synthetic construct
AVAAAAAAGRRGAGA

SEQ ID NO: 792 - protein, 15 aa, synthetic construct
AVAPAAARAPAGERA

SEQ ID NO: 793 - protein, 15 aa, synthetic construct
AVCSAHGGAGGRGAG

SEQ ID NO: 794 - protein, 15 aa, synthetic construct
AVHFPGDAAGVPGQA

SEQ ID NO: 795 - protein, 15 aa, synthetic construct
AVPAGLRGTAGKQEG

SEQ ID NO: 796 - protein, 15 aa, synthetic construct
AVPASVASAPRTAQH

SEQ ID NO: 797 - protein, 15 aa, synthetic construct
AVQGGESAALRAGPA

SEQ ID NO: 798 - protein, 15 aa, synthetic construct
AVQLPGPEPAGAVPR

SEQ ID NO: 799 - protein, 15 aa, synthetic construct
AWADPNPVPKWREQQ

SEQ ID NO: 800 - protein, 15 aa, synthetic construct
AWEPSARAKLGAVAA

SEQ ID NO: 801 - protein, 15 aa, synthetic construct
AWGAAAAVAGTAGSA

SEQ ID NO: 802 - protein, 15 aa, synthetic construct
AWGPGAAAPPAAAGC

SEQ ID NO: 803 - protein, 15 aa, synthetic construct
AWPGAAGPPSGTTRR

SEQ ID NO: 804 - protein, 15 aa, synthetic construct
AWPPSPGGRRAFGAR

SEQ ID NO: 805 - protein, 15 aa, synthetic construct
AWRPAAAPAAVRPPA

SEQ ID NO: 806 - protein, 15 aa, synthetic construct
AYPGPPAPHAAGQAP

SEQ ID NO: 807 - protein, 15 aa, synthetic construct
CAAGRTGLLLEFRAH

SEQ ID NO: 808 - protein, 15 aa, synthetic construct
CAASCSSGACTSAVP

SEQ ID NO: 809 - protein, 15 aa, synthetic construct
CACGRCPSWWSLACC

SEQ ID NO: 810 - protein, 15 aa, synthetic construct
CACTACRPCSPSSRR

SEQ ID NO: 811 - protein, 15 aa, synthetic construct
CAETPSGTLPSPLAC

SEQ ID NO: 812 - protein, 15 aa, synthetic construct
CAGIPVSVSRWSDPS

SEQ ID NO: 813 - protein, 15 aa, synthetic construct
CAGPCSGRATCATSI

SEQ ID NO: 814 - protein, 15 aa, synthetic construct
CAPSGRHSAAGSCGS

SEQ ID NO: 815 - protein, 15 aa, synthetic construct
CASFWRPCGRPGPGR

SEQ ID NO: 816 - protein, 15 aa, synthetic construct
CASPPPHLVARSSSP

SEQ ID NO: 817 - protein, 15 aa, synthetic construct
CAWSSPSARSSFSSS

SEQ ID NO: 818 - protein, 15 aa, synthetic construct
CCAFSWGRCGGSGPG

SEQ ID NO: 819 - protein, 15 aa, synthetic construct
CCAGRRPSSGSCSSC

SEQ ID NO: 820 - protein, 15 aa, synthetic construct
CCAPPCPCSRCPWRG

SEQ ID NO: 821 - protein, 15 aa, synthetic construct
CCASEGWAAWEPEQQ

SEQ ID NO: 822 - protein, 15 aa, synthetic construct
CCASGPCGCSTGAAW

SEQ ID NO: 823 - protein, 15 aa, synthetic construct
CCCCCCRWPAAPRPG

SEQ ID NO: 824 - protein, 15 aa, synthetic construct
CCEAPLLLQVWRRQK

SEQ ID NO: 825 - protein, 15 aa, synthetic construct
CCGAAAGVSGRASAA

SEQ ID NO: 826 - protein, 15 aa, synthetic construct
CCGREHQPGTYPGRE

SEQ ID NO: 827 - protein, 15 aa, synthetic construct
CCGSRAPFRPPSRRP

SEQ ID NO: 828 - protein, 15 aa, synthetic construct
CCLGGCAGCRSCWRW

SEQ ID NO: 829 - protein, 15 aa, synthetic construct
CCLPTAPSTASGCPC

SEQ ID NO: 830 - protein, 15 aa, synthetic construct
CCPCSPRSWPPPARC

SEQ ID NO: 831 - protein, 15 aa, synthetic construct
CCPSASWPPCCWPPG

SEQ ID NO: 832 - protein, 15 aa, synthetic construct
CCRALARCCCSSSPR

SEQ ID NO: 833 - protein, 15 aa, synthetic construct
CCRCLAAPGDSGSAR

SEQ ID NO: 834 - protein, 15 aa, synthetic construct
CCSGGRPCCCARSAC

SEQ ID NO: 835 - protein, 15 aa, synthetic construct
CDHVPARGQARLYHR

SEQ ID NO: 836 - protein, 15 aa, synthetic construct
CEASSGSWCWCSGRL

SEQ ID NO: 837 - protein, 15 aa, synthetic construct
CEVANATCSPVWGVY

SEQ ID NO: 838 - protein, 15 aa, synthetic construct
CGCSRNGSSCSLARG

SEQ ID NO: 839 - protein, 15 aa, synthetic construct
CGGRACARPGWSCAP

SEQ ID NO: 840 - protein, 15 aa, synthetic construct
CGLHQQQSWGMGPPR

SEQ ID NO: 841 - protein, 15 aa, synthetic construct
CGPCGPPYARGCGSP

SEQ ID NO: 842 - protein, 15 aa, synthetic construct
CGPGASARHGQRLFG

SEQ ID NO: 843 - protein, 15 aa, synthetic construct
CGPPRLRCGCAWSWP

SEQ ID NO: 844 - protein, 15 aa, synthetic construct
CGRDGPAGAEVTLPA

SEQ ID NO: 845 - protein, 15 aa, synthetic construct
CGVRAGLCGCSWLCA

SEQ ID NO: 846 - protein, 15 aa, synthetic construct
CGWRCCSCSWWPPAG

SEQ ID NO: 847 - protein, 15 aa, synthetic construct
CHRAGPGAQEGPGVA

SEQ ID NO: 848 - protein, 15 aa, synthetic construct
CHWRREEAAPLPARH

SEQ ID NO: 849 - protein, 15 aa, synthetic construct
CKWIWSFLGMKHYPV

SEQ ID NO: 850 - protein, 15 aa, synthetic construct
CLARLAPPPPGLEAA

SEQ ID NO: 851 - protein, 15 aa, synthetic construct
CLGALGPRQAGCCCC

SEQ ID NO: 852 - protein, 15 aa, synthetic construct
CLGRPKPCPQMARTT

SEQ ID NO: 853 - protein, 15 aa, synthetic construct
CLGSPPSPSSLAAAG

SEQ ID NO: 854 - protein, 15 aa, synthetic construct
CLTAPTAVTPASAAL

SEQ ID NO: 855 - protein, 15 aa, synthetic construct
CLVHGPPPTAGPRER

SEQ ID NO: 856 - protein, 15 aa, synthetic construct
CLVRTTEPYLNLSSL

SEQ ID NO: 857 - protein, 15 aa, synthetic construct
CMATEPRGAPGLRSP

SEQ ID NO: 858 - protein, 15 aa, synthetic construct
CMGARGRCSSCCCWL

SEQ ID NO: 859 - protein, 15 aa, synthetic construct
CNAWWPGTQHVSPCR

SEQ ID NO: 860 - protein, 15 aa, synthetic construct
CPAAPVPAAPRLCCA

SEQ ID NO: 861 - protein, 15 aa, synthetic construct
CPAARASSRSTCPPS

SEQ ID NO: 862 - protein, 15 aa, synthetic construct
CPAVSGSSSRPATGA

SEQ ID NO: 863 - protein, 15 aa, synthetic construct
CPGAAAAARPQAGPS

SEQ ID NO: 864 - protein, 15 aa, synthetic construct
CPGLLSCSCCLSTAQ

SEQ ID NO: 865 - protein, 15 aa, synthetic construct
CPGRLHLGPWCHCCC

SEQ ID NO: 866 - protein, 15 aa, synthetic construct
CPPAAGAPPPNPRGG

SEQ ID NO: 867 - protein, 15 aa, synthetic construct
CPPGPSSWSPPASSW

SEQ ID NO: 868 - protein, 15 aa, synthetic construct
CPPMLQSTRPPRTSP

SEQ ID NO: 869 - protein, 15 aa, synthetic construct
CPPPGSTPRTAPPGI

SEQ ID NO: 870 - protein, 15 aa, synthetic construct
CPRAAAAAALRPASG

SEQ ID NO: 871 - protein, 15 aa, synthetic construct
CPRLAGPGRAAAGQE

SEQ ID NO: 872 - protein, 15 aa, synthetic construct
CPRPWPYAPTSGASF

SEQ ID NO: 873 - protein, 15 aa, synthetic construct
CPRQPAAATSPARAA

SEQ ID NO: 874 - protein, 15 aa, synthetic construct
CPSFSSPYSLSRDYC

SEQ ID NO: 875 - protein, 15 aa, synthetic construct
CPWWISSARPALSLG

SEQ ID NO: 876 - protein, 15 aa, synthetic construct
CQAEAAARTAAPRSW

SEQ ID NO: 877 - protein, 15 aa, synthetic construct
CQDAAKEVRAWGKGV

SEQ ID NO: 878 - protein, 15 aa, synthetic construct
CQGLRQGCAGRYSAS

SEQ ID NO: 879 - protein, 15 aa, synthetic construct
CQNVELSGLVNIVRM

SEQ ID NO: 880 - protein, 15 aa, synthetic construct
CQPERAICSLRQIIP

SEQ ID NO: 881 - protein, 15 aa, synthetic construct
CQVVGGGSETCTRPG

SEQ ID NO: 882 - protein, 15 aa, synthetic construct
CRAAWQGAALLWACS

SEQ ID NO: 883 - protein, 15 aa, synthetic construct
CRAGWPGAPLTGSRC

SEQ ID NO: 884 - protein, 15 aa, synthetic construct
CRALSSSGSPPTPIG

SEQ ID NO: 885 - protein, 15 aa, synthetic construct
CRCRESCVCPWSIPP

SEQ ID NO: 886 - protein, 15 aa, synthetic construct
CRGGTFLESGHCTSA

SEQ ID NO: 887 - protein, 15 aa, synthetic construct
CRSATSSSPMSPLSS

SEQ ID NO: 888 - protein, 15 aa, synthetic construct
CRSWTPAGAARAAAT

SEQ ID NO: 889 - protein, 15 aa, synthetic construct
CRVCGGSRGTCGHSQ

SEQ ID NO: 890 - protein, 15 aa, synthetic construct
CRWSWSCVPGAGWAG

SEQ ID NO: 891 - protein, 15 aa, synthetic construct
CSCLGPPLPPAWPGG

SEQ ID NO: 892 - protein, 15 aa, synthetic construct
CSGALGCGPGKTPPR

SEQ ID NO: 893 - protein, 15 aa, synthetic construct
CSGTAWAPSTRPTTP

SEQ ID NO: 894 - protein, 15 aa, synthetic construct
CSLQGSEVRASVSQA

SEQ ID NO: 895 - protein, 15 aa, synthetic construct
CSPLCRSRWMEMKRN

SEQ ID NO: 896 - protein, 15 aa, synthetic construct
CSPPPPPPGGLRSCC

SEQ ID NO: 897 - protein, 15 aa, synthetic construct
CSPSSRPNPPSGPTS

SEQ ID NO: 898 - protein, 15 aa, synthetic construct
CSPTACRMPPWWTWR

SEQ ID NO: 899 - protein, 15 aa, synthetic construct
CSQPGWLPSTPPTSA

SEQ ID NO: 900 - protein, 15 aa, synthetic construct
CSSPSSGTGCRSCYS

SEQ ID NO: 901 - protein, 15 aa, synthetic construct
CSTASPCGGATVMWR

SEQ ID NO: 902 - protein, 15 aa, synthetic construct
CTATWAKRCCCPGPG

SEQ ID NO: 903 - protein, 15 aa, synthetic construct
CTDGWLGFSAPFSVS

SEQ ID NO: 904 - protein, 15 aa, synthetic construct
CTEAVFWRKKQACTR

SEQ ID NO: 905 - protein, 15 aa, synthetic construct
CTEGGAAARGRDASP

SEQ ID NO: 906 - protein, 15 aa, synthetic construct
CTEMPGYLALPSASR

SEQ ID NO: 907 - protein, 15 aa, synthetic construct
CTGSAKGCDSTTTRR

SEQ ID NO: 908 - protein, 15 aa, synthetic construct
CTGSAMAWCAKPGSC

SEQ ID NO: 909 - protein, 15 aa, synthetic construct
CTSTSTAVSALSAMR

SEQ ID NO: 910 - protein, 15 aa, synthetic construct
CVRENVPAVWGSPSL

SEQ ID NO: 911 - protein, 15 aa, synthetic construct
CWAPLSAAALWPQPP

SEQ ID NO: 912 - protein, 15 aa, synthetic construct
CWIDASLGGGAHASG

SEQ ID NO: 913 - protein, 15 aa, synthetic construct
CWRSSPACWTGSVRS

SEQ ID NO: 914 - protein, 15 aa, synthetic construct
CYCCCSSSGPGPLRA

SEQ ID NO: 915 - protein, 15 aa, synthetic construct
DAVQGVRLTAGSAAG

SEQ ID NO: 916 - protein, 15 aa, synthetic construct
DCEWSRDPRAPAGHP

SEQ ID NO: 917 - protein, 15 aa, synthetic construct
DCGSELGGERGEPGG

SEQ ID NO: 918 - protein, 15 aa, synthetic construct
DCRERAAAAAAGGAG

SEQ ID NO: 919 - protein, 15 aa, synthetic construct
DFQQDRDARRGEGRP

SEQ ID NO: 920 - protein, 15 aa, synthetic construct
DGQAGFRGVSQGLTP

SEQ ID NO: 921 - protein, 15 aa, synthetic construct
DGTRDSHGHDHRRLF

SEQ ID NO: 922 - protein, 15 aa, synthetic construct
DHGCPGPALSARVQA

SEQ ID NO: 923 - protein, 15 aa, synthetic construct
DHPCTLLHLWQDRRQ

SEQ ID NO: 924 - protein, 15 aa, synthetic construct
DHQTENHRPSGAMPM

SEQ ID NO: 925 - protein, 15 aa, synthetic construct
DKKSDMGHRIHSPGI

SEQ ID NO: 926 - protein, 15 aa, synthetic construct
DLFLQQLLMPSGLHH

SEQ ID NO: 927 - protein, 15 aa, synthetic construct
DLLGQKLCIGPIKPD

SEQ ID NO: 928 - protein, 15 aa, synthetic construct
DLPSPGGSGGNQGRT

SEQ ID NO: 929 - protein, 15 aa, synthetic construct
DLQIHSEGGATELGA

SEQ ID NO: 930 - protein, 15 aa, synthetic construct
DLSGGESSRRTGAAR

SEQ ID NO: 931 - protein, 15 aa, synthetic construct
DNGRGQRVEFWNRHD

SEQ ID NO: 932 - protein, 15 aa, synthetic construct
DPAGRLVCAAALQRG

SEQ ID NO: 933 - protein, 15 aa, synthetic construct
DPVATSAVPATAAAA

SEQ ID NO: 934 - protein, 15 aa, synthetic construct
DQLPEFPKWQRTGPA

SEQ ID NO: 935 - protein, 15 aa, synthetic construct
DRGKTEAQATPRRGC

SEQ ID NO: 936 - protein, 15 aa, synthetic construct
DSQRTLTCSFSSMGC

SEQ ID NO: 937 - protein, 15 aa, synthetic construct
EACAGCRAPLGAGLS

SEQ ID NO: 938 - protein, 15 aa, synthetic construct
EAGGQRGRAAAAPQL

SEQ ID NO: 939 - protein, 15 aa, synthetic construct
EAGPGEEPEAHQHRG

SEQ ID NO: 940 - protein, 15 aa, synthetic construct
EAGQWLLGFVAQPWG

SEQ ID NO: 941 - protein, 15 aa, synthetic construct
EALLAGPWVPVAAGA

SEQ ID NO: 942 - protein, 15 aa, synthetic construct
EARPLISPSPSVLPW

SEQ ID NO: 943 - protein, 15 aa, synthetic construct
EARSPHRLQREDTAF

SEQ ID NO: 944 - protein, 15 aa, synthetic construct
EATQGAERLRRGVRR

SEQ ID NO: 945 - protein, 15 aa, synthetic construct
EAVPGAPEAEPDSGT

SEQ ID NO: 946 - protein, 15 aa, synthetic construct
EAVRLQPGQHLQQPD

SEQ ID NO: 947 - protein, 15 aa, synthetic construct
EAVTATAAAAAGSLG

SEQ ID NO: 948 - protein, 15 aa, synthetic construct
ECCQRVSPAWGEAFS

SEQ ID NO: 949 - protein, 15 aa, synthetic construct
ECCSDCREAGTGTGR

SEQ ID NO: 950 - protein, 15 aa, synthetic construct
ECLLRAERGQPGRLS

SEQ ID NO: 951 - protein, 15 aa, synthetic construct
ECPWAVVSGRGPDTA

SEQ ID NO: 952 - protein, 15 aa, synthetic construct
ECVTGCYPIGARGTL

SEQ ID NO: 953 - protein, 15 aa, synthetic construct
EEEAFSRQPGGPGSP

SEQ ID NO: 954 - protein, 15 aa, synthetic construct
EEILSGVQGRHQVQE

SEQ ID NO: 955 - protein, 15 aa, synthetic construct
EFACARGVPQGALRP

SEQ ID NO: 956 - protein, 15 aa, synthetic construct
EGAAPVGREAGEQPG

SEQ ID NO: 957 - protein, 15 aa, synthetic construct
EGGPCSAAPAAAGLL

SEQ ID NO: 958 - protein, 15 aa, synthetic construct
EGHHRQASGGAGASQ

SEQ ID NO: 959 - protein, 15 aa, synthetic construct
EGHVARRAPAAQDAP

SEQ ID NO: 960 - protein, 15 aa, synthetic construct
EGLRGCPVSPCPHPY

SEQ ID NO: 961 - protein, 15 aa, synthetic construct
EGPYACRCAGHGGLH

SEQ ID NO: 962 - protein, 15 aa, synthetic construct
EGRERLGATLPAAGC

SEQ ID NO: 963 - protein, 15 aa, synthetic construct
EGRVLPRWAAERGGR

SEQ ID NO: 964 - protein, 15 aa, synthetic construct
EKIQKPLVSGRQRRI

SEQ ID NO: 965 - protein, 15 aa, synthetic construct
EKPYNSSKLYSSWTD

SEQ ID NO: 966 - protein, 15 aa, synthetic construct
ELHVGLAGQPVRLPA

SEQ ID NO: 967 - protein, 15 aa, synthetic construct
ELPQLLRPPGPLQLR

SEQ ID NO: 968 - protein, 15 aa, synthetic construct
ELRSQVPPHPRHPPG

SEQ ID NO: 969 - protein, 15 aa, synthetic construct
ELVLPPPPLLQPPDP

SEQ ID NO: 970 - protein, 15 aa, synthetic construct
ELVPAAGGDERRVAA

SEQ ID NO: 971 - protein, 15 aa, synthetic construct
ELVPFLHLLLLDLLC

SEQ ID NO: 972 - protein, 15 aa, synthetic construct
ELYRPPAPRSFARAS

SEQ ID NO: 973 - protein, 15 aa, synthetic construct
EMATRPAPLRASRPP

SEQ ID NO: 974 - protein, 15 aa, synthetic construct
ENGLVDGGKVGMQTL

SEQ ID NO: 975 - protein, 15 aa, synthetic construct
EPAAAAGNPAAAHRG

SEQ ID NO: 976 - protein, 15 aa, synthetic construct
EPAAAARRAPGEAVD

SEQ ID NO: 977 - protein, 15 aa, synthetic construct
EPAAEDGACGHRQGA

SEQ ID NO: 978 - protein, 15 aa, synthetic construct
EPAAEGGELRAEMAA

SEQ ID NO: 979 - protein, 15 aa, synthetic construct
EPAALPLHRVPGHRA

SEQ ID NO: 980 - protein, 15 aa, synthetic construct
EPAARQPSAAARQPR

SEQ ID NO: 981 - protein, 15 aa, synthetic construct
EPAEPGPPSGAAQAA

SEQ ID NO: 982 - protein, 15 aa, synthetic construct
EPAEREMCWVRGLGR

SEQ ID NO: 983 - protein, 15 aa, synthetic construct
EPAGAPHTGPLGARA

SEQ ID NO: 984 - protein, 15 aa, synthetic construct
EPAGGQRRGQHQPRA

SEQ ID NO: 985 - protein, 15 aa, synthetic construct
EPAGHPDSAGPAEPR

SEQ ID NO: 986 - protein, 15 aa, synthetic construct
EPAGLLARKEPAKVR

SEQ ID NO: 987 - protein, 15 aa, synthetic construct
EPAGLRLPGGLLLGW

SEQ ID NO: 988 - protein, 15 aa, synthetic construct
EPAGPLRRGGAAHSA

SEQ ID NO: 989 - protein, 15 aa, synthetic construct
EPAGRPRFLAAGSAA

SEQ ID NO: 990 - protein, 15 aa, synthetic construct
EPAPADGENARRPRD

SEQ ID NO: 991 - protein, 15 aa, synthetic construct
EPAPGADRGCEPWRP

SEQ ID NO: 992 - protein, 15 aa, synthetic construct
EPAPGWHRTSLLLVS

SEQ ID NO: 993 - protein, 15 aa, synthetic construct
EPAPVSVQDGPATER

SEQ ID NO: 994 - protein, 15 aa, synthetic construct
EPAQPAAEAGSEPVP

SEQ ID NO: 995 - protein, 15 aa, synthetic construct
EPARAGLRGAPCPPR

SEQ ID NO: 996 - protein, 15 aa, synthetic construct
EPARDSELVALRFLY

SEQ ID NO: 997 - protein, 15 aa, synthetic construct
EPARPRALRLRALRG

SEQ ID NO: 998 - protein, 15 aa, synthetic construct
EPASLAGERVALDHL

SEQ ID NO: 999 - protein, 15 aa, synthetic construct
EPAVGHRHERRLGVP

SEQ ID NO: 1000 - protein, 15 aa, synthetic construct
EPAWGALCEWPAPAS

SEQ ID NO: 1001 - protein, 15 aa, synthetic construct
EPDPRIGRAPVESRL

SEQ ID NO: 1002 - protein, 15 aa, synthetic construct
EPDWRSRAARSRAHR

SEQ ID NO: 1003 - protein, 15 aa, synthetic construct
EPEEQVSRDGSERGQ

SEQ ID NO: 1004 - protein, 15 aa, synthetic construct
EPEPDGRRRRGRAGA

SEQ ID NO: 1005 - protein, 15 aa, synthetic construct
EPGAGDPGNAPVRAL

SEQ ID NO: 1006 - protein, 15 aa, synthetic construct
EPGAGEAAAAGRGRR

SEQ ID NO: 1007 - protein, 15 aa, synthetic construct
EPGEPERGGRRRPAA

SEQ ID NO: 1008 - protein, 15 aa, synthetic construct
EPGEPLQLLVRRRSE

SEQ ID NO: 1009 - protein, 15 aa, synthetic construct
EPGEPLQRLVRRRPE

SEQ ID NO: 1010 - protein, 15 aa, synthetic construct
EPGERGVQGLREGHD

SEQ ID NO: 1011 - protein, 15 aa, synthetic construct
EPGGGGGWGAGAAAT

SEQ ID NO: 1012 - protein, 15 aa, synthetic construct
EPGGRGGSFGSRGDQ

SEQ ID NO: 1013 - protein, 15 aa, synthetic construct
EPGGRRHRCCRRCCC

SEQ ID NO: 1014 - protein, 15 aa, synthetic construct
EPGHGRPARGHPALL

SEQ ID NO: 1015 - protein, 15 aa, synthetic construct
EPGHQSEDNRVQSPS

SEQ ID NO: 1016 - protein, 15 aa, synthetic construct
EPGIRPQERAACPGA

SEQ ID NO: 1017 - protein, 15 aa, synthetic construct
EPGKSGGLGPPRSHP

SEQ ID NO: 1018 - protein, 15 aa, synthetic construct
EPGLHQPYRAGCRFA

SEQ ID NO: 1019 - protein, 15 aa, synthetic construct
EPGLRSRRPTRGRQQ

SEQ ID NO: 1020 - protein, 15 aa, synthetic construct
EPGPAQGAGFRQLQP

SEQ ID NO: 1021 - protein, 15 aa, synthetic construct
EPGPRAAAAAAARGA

SEQ ID NO: 1022 - protein, 15 aa, synthetic construct
EPGQPLRLLGRPPSA

SEQ ID NO: 1023 - protein, 15 aa, synthetic construct
EPGQQAARLLEDSAQ

SEQ ID NO: 1024 - protein, 15 aa, synthetic construct
EPGRAVHLLRAADAA

SEQ ID NO: 1025 - protein, 15 aa, synthetic construct
EPGRGAFPRSVRPAE

SEQ ID NO: 1026 - protein, 15 aa, synthetic construct
EPGRGAGRQVHTGGP

SEQ ID NO: 1027 - protein, 15 aa, synthetic construct
EPGRGRASAPDNDLP

SEQ ID NO: 1028 - protein, 15 aa, synthetic construct
EPGRPPAQEEVPLRR

SEQ ID NO: 1029 - protein, 15 aa, synthetic construct
EPGRRQPVGRRQLPA

SEQ ID NO: 1030 - protein, 15 aa, synthetic construct
EPGRSPRLYSDGRRD

SEQ ID NO: 1031 - protein, 15 aa, synthetic construct
EPHEDACHPRCAARR

SEQ ID NO: 1032 - protein, 15 aa, synthetic construct
EPHGQDRGLHQRPRA

SEQ ID NO: 1033 - protein, 15 aa, synthetic construct
EPHLPRRRAPEQGGA

SEQ ID NO: 1034 - protein, 15 aa, synthetic construct
EPHPDPAGAHGAAAG

SEQ ID NO: 1035 - protein, 15 aa, synthetic construct
EPHPEKGLLQAGRQQ

SEQ ID NO: 1036 - protein, 15 aa, synthetic construct
EPIFQSSRGLMDGGS

SEQ ID NO: 1037 - protein, 15 aa, synthetic construct
EPIFQSSRGQMEGRC

SEQ ID NO: 1038 - protein, 15 aa, synthetic construct
EPIRHEPIKFIRLEP

SEQ ID NO: 1039 - protein, 15 aa, synthetic construct
EPISSQGSQERWQQK

SEQ ID NO: 1040 - protein, 15 aa, synthetic construct
EPITPQSQPTPISGL

SEQ ID NO: 1041 - protein, 15 aa, synthetic construct
EPLAAPGPGAPGAGL

SEQ ID NO: 1042 - protein, 15 aa, synthetic construct
EPLAAQDRLGVRMLP

SEQ ID NO: 1043 - protein, 15 aa, synthetic construct
EPLHERSGHSWDKHG

SEQ ID NO: 1044 - protein, 15 aa, synthetic construct
EPLHRWHHLGAETRR

SEQ ID NO: 1045 - protein, 15 aa, synthetic construct
EPLPAAAVGAGHGSR

SEQ ID NO: 1046 - protein, 15 aa, synthetic construct
EPLPATGGDRQRLGN

SEQ ID NO: 1047 - protein, 15 aa, synthetic construct
EPLPPRLPHGMPGAP

SEQ ID NO: 1048 - protein, 15 aa, synthetic construct
EPLQGVQVPAHRGSA

SEQ ID NO: 1049 - protein, 15 aa, synthetic construct
EPLQPGGCPEPQCGQ

SEQ ID NO: 1050 - protein, 15 aa, synthetic construct
EPLRAGPATNVQRGH

SEQ ID NO: 1051 - protein, 15 aa, synthetic construct
EPLRASPADICPGRP

SEQ ID NO: 1052 - protein, 15 aa, synthetic construct
EPLRGGRSPAAPRGH

SEQ ID NO: 1053 - protein, 15 aa, synthetic construct
EPLRPGCPLRAAALQ

SEQ ID NO: 1054 - protein, 15 aa, synthetic construct
EPLVAAGSPLQRGTA

SEQ ID NO: 1055 - protein, 15 aa, synthetic construct
EPMPTESLPCSTCLG

SEQ ID NO: 1056 - protein, 15 aa, synthetic construct
EPNCQRVPSHQVSTL

SEQ ID NO: 1057 - protein, 15 aa, synthetic construct
EPQETAEADGHLNQK

SEQ ID NO: 1058 - protein, 15 aa, synthetic construct
EPQGHGLLRRAADDC

SEQ ID NO: 1059 - protein, 15 aa, synthetic construct
EPQHPQLPNGLALRG

SEQ ID NO: 1060 - protein, 15 aa, synthetic construct
EPQLRPVRQDRVSHG

SEQ ID NO: 1061 - protein, 15 aa, synthetic construct
EPQNLFHLPSGEKFP

SEQ ID NO: 1062 - protein, 15 aa, synthetic construct
EPQPGLGAELPGAAG

SEQ ID NO: 1063 - protein, 15 aa, synthetic construct
EPQPPGDVRGLGPLR

SEQ ID NO: 1064 - protein, 15 aa, synthetic construct
EPQSPGVSAEQRRRR

SEQ ID NO: 1065 - protein, 15 aa, synthetic construct
EPQVHGHLAAPRRAR

SEQ ID NO: 1066 - protein, 15 aa, synthetic construct
EPQVLHGSQGEPARP

SEQ ID NO: 1067 - protein, 15 aa, synthetic construct
EPRAAAARQRRPARL

SEQ ID NO: 1068 - protein, 15 aa, synthetic construct
EPRAAAEARPAVPRP

SEQ ID NO: 1069 - protein, 15 aa, synthetic construct
EPRACLQHSGHAQRR

SEQ ID NO: 1070 - protein, 15 aa, synthetic construct
EPRAREAQVLRTQLQ

SEQ ID NO: 1071 - protein, 15 aa, synthetic construct
EPRAWGAVPGLPRAG

SEQ ID NO: 1072 - protein, 15 aa, synthetic construct
EPRDGTGLAARVPRA

SEQ ID NO: 1073 - protein, 15 aa, synthetic construct
EPREERGRRRRRERG

SEQ ID NO: 1074 - protein, 15 aa, synthetic construct
EPREGNRHAPGDRRR

SEQ ID NO: 1075 - protein, 15 aa, synthetic construct
EPRELRGGRAAGVAG

SEQ ID NO: 1076 - protein, 15 aa, synthetic construct
EPRGGGVPLPRHAGP

SEQ ID NO: 1077 - protein, 15 aa, synthetic construct
EPRGHLPAEGPPASL

SEQ ID NO: 1078 - protein, 15 aa, synthetic construct
EPRGLAAAGRRAALR

SEQ ID NO: 1079 - protein, 15 aa, synthetic construct
EPRGPPGRRWAGGSG

SEQ ID NO: 1080 - protein, 15 aa, synthetic construct
EPRGQLRTPSPPSPP

SEQ ID NO: 1081 - protein, 15 aa, synthetic construct
EPRGSARGSRGRWRW

SEQ ID NO: 1082 - protein, 15 aa, synthetic construct
EPRPPHRGEQRARSK

SEQ ID NO: 1083 - protein, 15 aa, synthetic construct
EPRRELGHGRAAGRR

SEQ ID NO: 1084 - protein, 15 aa, synthetic construct
EPRSNHRGAPGPAAG

SEQ ID NO: 1085 - protein, 15 aa, synthetic construct
EPSAPPPAARRTPAA

SEQ ID NO: 1086 - protein, 15 aa, synthetic construct
EPSARRAPSCACPAS

SEQ ID NO: 1087 - protein, 15 aa, synthetic construct
EPSAVPPTSPVAGEM

SEQ ID NO: 1088 - protein, 15 aa, synthetic construct
EPSFGAKSPAQPNPR

SEQ ID NO: 1089 - protein, 15 aa, synthetic construct
EPSGQRAVRAADRAG

SEQ ID NO: 1090 - protein, 15 aa, synthetic construct
EPSRMASSLLHHLSC

SEQ ID NO: 1091 - protein, 15 aa, synthetic construct
EPTAHPATRARVPTL

SEQ ID NO: 1092 - protein, 15 aa, synthetic construct
EPTATGSPGPARQTT

SEQ ID NO: 1093 - protein, 15 aa, synthetic construct
EPTLRESETQGSAAQ

SEQ ID NO: 1094 - protein, 15 aa, synthetic construct
EPVGQSGHRCAAGFH

SEQ ID NO: 1095 - protein, 15 aa, synthetic construct
EPVPAPGRLRHLRPV

SEQ ID NO: 1096 - protein, 15 aa, synthetic construct
EPVPARLGPARPPRL

SEQ ID NO: 1097 - protein, 15 aa, synthetic construct
EPVRPGGGSGGHSAR

SEQ ID NO: 1098 - protein, 15 aa, synthetic construct
EPVRVQGWRQLRDGS

SEQ ID NO: 1099 - protein, 15 aa, synthetic construct
EPVSGAPGRPAGPAR

SEQ ID NO: 1100 - protein, 15 aa, synthetic construct
EQCGGGMHGHEARVR

SEQ ID NO: 1101 - protein, 15 aa, synthetic construct
EQDPKVFPRKWASLG

SEQ ID NO: 1102 - protein, 15 aa, synthetic construct
EQRGGVRDRAGAAPG

SEQ ID NO: 1103 - protein, 15 aa, synthetic construct
EQVLRVPWRAAAALL

SEQ ID NO: 1104 - protein, 15 aa, synthetic construct
EQVSSLHPSGEHPRD

SEQ ID NO: 1105 - protein, 15 aa, synthetic construct
EREEERGGDWPSAAA

SEQ ID NO: 1106 - protein, 15 aa, synthetic construct
EREPAGRATQQHAHA

SEQ ID NO: 1107 - protein, 15 aa, synthetic construct
EREPSGRAGPAAPGA

SEQ ID NO: 1108 - protein, 15 aa, synthetic construct
ERGGHLQRPAHHSLP

SEQ ID NO: 1109 - protein, 15 aa, synthetic construct
ERGGRAATAPAPAAA

SEQ ID NO: 1110 - protein, 15 aa, synthetic construct
ERGITAGPPGVHPPT

SEQ ID NO: 1111 - protein, 15 aa, synthetic construct
ERGREPQGQAGGGAS

SEQ ID NO: 1112 - protein, 15 aa, synthetic construct
ERILGTPLSIYQSTS

SEQ ID NO: 1113 - protein, 15 aa, synthetic construct
ERLRPARQAALPQPL

SEQ ID NO: 1114 - protein, 15 aa, synthetic construct
ERPGWGQQAPSRPNR

SEQ ID NO: 1115 - protein, 15 aa, synthetic construct
ERPSRWNLALAPSAL

SEQ ID NO: 1116 - protein, 15 aa, synthetic construct
ERQEEEEGPHLGRGC

SEQ ID NO: 1117 - protein, 15 aa, synthetic construct
ERVAAPEALQTPPHH

SEQ ID NO: 1118 - protein, 15 aa, synthetic construct
ERVPSQSQRRFPLQM

SEQ ID NO: 1119 - protein, 15 aa, synthetic construct
ESPHLCSCWPPASVA

SEQ ID NO: 1120 - protein, 15 aa, synthetic construct
ESPLRWPRPSASPSA

SEQ ID NO: 1121 - protein, 15 aa, synthetic construct
ETVRPTPSLPPRPLH

SEQ ID NO: 1122 - protein, 15 aa, synthetic construct
EWDQSLQGLSAERGP

SEQ ID NO: 1123 - protein, 15 aa, synthetic construct
EWGARVAGGGQPVPR

SEQ ID NO: 1124 - protein, 15 aa, synthetic construct
EWSESGAARRRSRVQ

SEQ ID NO: 1125 - protein, 15 aa, synthetic construct
FLDPGGGRRSLCRGC

SEQ ID NO: 1126 - protein, 15 aa, synthetic construct
FRAEASGPTAPRQPR

SEQ ID NO: 1127 - protein, 15 aa, synthetic construct
FRPCHLPSPWSGHGV

SEQ ID NO: 1128 - protein, 15 aa, synthetic construct
FSPHPPLLCLHRGRH

SEQ ID NO: 1129 - protein, 15 aa, synthetic construct
FSTRGSRPPPQSGST

SEQ ID NO: 1130 - protein, 15 aa, synthetic construct
FTRAGRATPAEAGAR

SEQ ID NO: 1131 - protein, 15 aa, synthetic construct
FTSLSPTGLALARGR

SEQ ID NO: 1132 - protein, 15 aa, synthetic construct
FTSSTPSSTPTRIPA

SEQ ID NO: 1133 - protein, 15 aa, synthetic construct
GAAAAGHRAAPQGLP

SEQ ID NO: 1134 - protein, 15 aa, synthetic construct
GAAAARAGAAGAGRG

SEQ ID NO: 1135 - protein, 15 aa, synthetic construct
GAAAGRAGAAAGVGA

SEQ ID NO: 1136 - protein, 15 aa, synthetic construct
GAAAGREGQAGRRAA

SEQ ID NO: 1137 - protein, 15 aa, synthetic construct
GAAEGQVVSARAPGA

SEQ ID NO: 1138 - protein, 15 aa, synthetic construct
GAAPLVAPGPDPRNC

SEQ ID NO: 1139 - protein, 15 aa, synthetic construct
GAAPPMAPSWRRNSP

SEQ ID NO: 1140 - protein, 15 aa, synthetic construct
GAAPRLLLRHLRGGV

SEQ ID NO: 1141 - protein, 15 aa, synthetic construct
GAAQRERGQPGGGAE

SEQ ID NO: 1142 - protein, 15 aa, synthetic construct
GAARAAAAAAAAPAG

SEQ ID NO: 1143 - protein, 15 aa, synthetic construct
GADPQRATTPRLPAQ

SEQ ID NO: 1144 - protein, 15 aa, synthetic construct
GADPRVPEQLPWAGR

SEQ ID NO: 1145 - protein, 15 aa, synthetic construct
GADWLRTRPRAVGGA

SEQ ID NO: 1146 - protein, 15 aa, synthetic construct
GAGAGAPRGAVSGVP

SEQ ID NO: 1147 - protein, 15 aa, synthetic construct
GAGERACGPRGRPAA

SEQ ID NO: 1148 - protein, 15 aa, synthetic construct
GAGGGARAGVRGAGH

SEQ ID NO: 1149 - protein, 15 aa, synthetic construct
GAGGGEGPDPGEHLA

SEQ ID NO: 1150 - protein, 15 aa, synthetic construct
GAGGPGPGQPPAGHD

SEQ ID NO: 1151 - protein, 15 aa, synthetic construct
GAGLRRGPRPGGGAE

SEQ ID NO: 1152 - protein, 15 aa, synthetic construct
GAGQRGLRAERQAAA

SEQ ID NO: 1153 - protein, 15 aa, synthetic construct
GAGRGRGGGGGSGAG

SEQ ID NO: 1154 - protein, 15 aa, synthetic construct
GALAAAVGSRVAPGC

SEQ ID NO: 1155 - protein, 15 aa, synthetic construct
GALADVGAHGAVGVA

SEQ ID NO: 1156 - protein, 15 aa, synthetic construct
GALPVPGPAGGLPGP

SEQ ID NO: 1157 - protein, 15 aa, synthetic construct
GALRGPAEPVHPRSL

SEQ ID NO: 1158 - protein, 15 aa, synthetic construct
GALVGMAPFARLWSG

SEQ ID NO: 1159 - protein, 15 aa, synthetic construct
GAPAGPRVRASACRG

SEQ ID NO: 1160 - protein, 15 aa, synthetic construct
GAPAKKATRQKPIAR

SEQ ID NO: 1161 - protein, 15 aa, synthetic construct
GAPAPGAARPVSAEP

SEQ ID NO: 1162 - protein, 15 aa, synthetic construct
GAPARSASRHAAAAA

SEQ ID NO: 1163 - protein, 15 aa, synthetic construct
GAPEPPPQPGPSASV

SEQ ID NO: 1164 - protein, 15 aa, synthetic construct
GAPHPRAVPPPLQVP

SEQ ID NO: 1165 - protein, 15 aa, synthetic construct
GAPKPPPAALRGPGP

SEQ ID NO: 1166 - protein, 15 aa, synthetic construct
GAPLPRAVLGGYLRQ

SEQ ID NO: 1167 - protein, 15 aa, synthetic construct
GAPLSPSLHRAHQME

SEQ ID NO: 1168 - protein, 15 aa, synthetic construct
GAPLSPSLHTAHHLE

SEQ ID NO: 1169 - protein, 15 aa, synthetic construct
GAPLSPSLHTAYNLE

SEQ ID NO: 1170 - protein, 15 aa, synthetic construct
GAPLSSAGRREPEQR

SEQ ID NO: 1171 - protein, 15 aa, synthetic construct
GAPPAPRRRPGPQCA

SEQ ID NO: 1172 - protein, 15 aa, synthetic construct
GAPPSPFLHTAHHLE

SEQ ID NO: 1173 - protein, 15 aa, synthetic construct
GAPQHGVLLRPGAAE

SEQ ID NO: 1174 - protein, 15 aa, synthetic construct
GAPQLQPLPARHHRQ

SEQ ID NO: 1175 - protein, 15 aa, synthetic construct
GAPQPHGRGLGLHCA

SEQ ID NO: 1176 - protein, 15 aa, synthetic construct
GAPRNNCIAVEPLEE

SEQ ID NO: 1177 - protein, 15 aa, synthetic construct
GAPRPGARAAVRHRR

SEQ ID NO: 1178 - protein, 15 aa, synthetic construct
GAPRWRCASSTPCWA

SEQ ID NO: 1179 - protein, 15 aa, synthetic construct
GAPSCGEAAGAPGRE

SEQ ID NO: 1180 - protein, 15 aa, synthetic construct
GAPSGPRAFAPTGSW

SEQ ID NO: 1181 - protein, 15 aa, synthetic construct
GAPSPRAGSGPAASK

SEQ ID NO: 1182 - protein, 15 aa, synthetic construct
GAPVPSLHAQLERLL

SEQ ID NO: 1183 - protein, 15 aa, synthetic construct
GAQVRLLAAHWIPSL

SEQ ID NO: 1184 - protein, 15 aa, synthetic construct
GARDSPLQLLLQPRA

SEQ ID NO: 1185 - protein, 15 aa, synthetic construct
GARNQFIPARPGAGA

SEQ ID NO: 1186 - protein, 15 aa, synthetic construct
GARPAGPRALASSPA

SEQ ID NO: 1187 - protein, 15 aa, synthetic construct
GARRRGARLLAAGVV

SEQ ID NO: 1188 - protein, 15 aa, synthetic construct
GASAGSAGTGLLGGR

SEQ ID NO: 1189 - protein, 15 aa, synthetic construct
GASAWGMEAVPLTSL

SEQ ID NO: 1190 - protein, 15 aa, synthetic construct
GASRSQGSGLCPDAQ

SEQ ID NO: 1191 - protein, 15 aa, synthetic construct
GATADTRAAKGADSE

SEQ ID NO: 1192 - protein, 15 aa, synthetic construct
GATGAPGRASLLGPR

SEQ ID NO: 1193 - protein, 15 aa, synthetic construct
GATRLLTGPGLEPGA

SEQ ID NO: 1194 - protein, 15 aa, synthetic construct
GAVGACDRAGRHAGH

SEQ ID NO: 1195 - protein, 15 aa, synthetic construct
GAVPRGARPAEAVLQ

SEQ ID NO: 1196 - protein, 15 aa, synthetic construct
GCAPSEGERTSRGAA

SEQ ID NO: 1197 - protein, 15 aa, synthetic construct
GCCCLAWWAQSSVRR

SEQ ID NO: 1198 - protein, 15 aa, synthetic construct
GCPIPTWFCPNRELQ

SEQ ID NO: 1199 - protein, 15 aa, synthetic construct
GCPRGPGPDRRPRSG

SEQ ID NO: 1200 - protein, 15 aa, synthetic construct
GCPRSEGCPRMVGPG

SEQ ID NO: 1201 - protein, 15 aa, synthetic construct
GCSARATERSSPRRQ

SEQ ID NO: 1202 - protein, 15 aa, synthetic construct
GCTTSGGKRAALGGV

SEQ ID NO: 1203 - protein, 15 aa, synthetic construct
GCWRCCGPRGWVRHA

SEQ ID NO: 1204 - protein, 15 aa, synthetic construct
GDESVFRLRAGRRPA

SEQ ID NO: 1205 - protein, 15 aa, synthetic construct
GDGASRASQSRIAAA

SEQ ID NO: 1206 - protein, 15 aa, synthetic construct
GDLSEQQHRPRLLQP

SEQ ID NO: 1207 - protein, 15 aa, synthetic construct
GDPRQPRVLCPGEQD

SEQ ID NO: 1208 - protein, 15 aa, synthetic construct
GDPTAWRGIRPRFGL

SEQ ID NO: 1209 - protein, 15 aa, synthetic construct
GDRLHRQQHRGGPGG

SEQ ID NO: 1210 - protein, 15 aa, synthetic construct
GDSGALPQLRRVQLL

SEQ ID NO: 1211 - protein, 15 aa, synthetic construct
GDVCLSHCLREARSQ

SEQ ID NO: 1212 - protein, 15 aa, synthetic construct
GEAALRGERTVCSRP

SEQ ID NO: 1213 - protein, 15 aa, synthetic construct
GEGDGSGGGGDGCRR

SEQ ID NO: 1214 - protein, 15 aa, synthetic construct
GEGDVRCRGAASAVA

SEQ ID NO: 1215 - protein, 15 aa, synthetic construct
GEGQERRGWRPPGAR

SEQ ID NO: 1216 - protein, 15 aa, synthetic construct
GEHGEQRGPQGVLRS

SEQ ID NO: 1217 - protein, 15 aa, synthetic construct
GEIPGAHALLAPDPV

SEQ ID NO: 1218 - protein, 15 aa, synthetic construct
GEPAPEPGPEPGPRR

SEQ ID NO: 1219 - protein, 15 aa, synthetic construct
GEPPCWGAGPDQSCC

SEQ ID NO: 1220 - protein, 15 aa, synthetic construct
GESATARGPQSAAAA

SEQ ID NO: 1221 - protein, 15 aa, synthetic construct
GESPALLRSPIQQPL

SEQ ID NO: 1222 - protein, 15 aa, synthetic construct
GFCQFPPHPAPVYLR

SEQ ID NO: 1223 - protein, 15 aa, synthetic construct
GFDRLRTAGHDPGCA

SEQ ID NO: 1224 - protein, 15 aa, synthetic construct
GFGQQQQRLGARLLG

SEQ ID NO: 1225 - protein, 15 aa, synthetic construct
GFPPASCGRSHFSGD

SEQ ID NO: 1226 - protein, 15 aa, synthetic construct
GGAAAASRDNSGPRP

SEQ ID NO: 1227 - protein, 15 aa, synthetic construct
GGAERPLQDRGGGRR

SEQ ID NO: 1228 - protein, 15 aa, synthetic construct
GGAGALVGPGLPGGR

SEQ ID NO: 1229 - protein, 15 aa, synthetic construct
GGAGERALYTLCSRE

SEQ ID NO: 1230 - protein, 15 aa, synthetic construct
GGAGRGWAATAVGVA

SEQ ID NO: 1231 - protein, 15 aa, synthetic construct
GGAMGAGRGRHSPPG

SEQ ID NO: 1232 - protein, 15 aa, synthetic construct
GGAPGSCARSRRGWA

SEQ ID NO: 1233 - protein, 15 aa, synthetic construct
GGARGAGPGPGVGGR

SEQ ID NO: 1234 - protein, 15 aa, synthetic construct
GGATAGLRGCCAAGG

SEQ ID NO: 1235 - protein, 15 aa, synthetic construct
GGCAGRPGRVAPAAA

SEQ ID NO: 1236 - protein, 15 aa, synthetic construct
GGCGGWRCRRCDAAA

SEQ ID NO: 1237 - protein, 15 aa, synthetic construct
GGCPGRPGGHDRSRR

SEQ ID NO: 1238 - protein, 15 aa, synthetic construct
GGDGGVGTHGDRFHQ

SEQ ID NO: 1239 - protein, 15 aa, synthetic construct
GGDKEPHAGKGAGAV

SEQ ID NO: 1240 - protein, 15 aa, synthetic construct
GGDRGGGGQTRGRQP

SEQ ID NO: 1241 - protein, 15 aa, synthetic construct
GGDRPGAGRRSCSAT

SEQ ID NO: 1242 - protein, 15 aa, synthetic construct
GGFAGCGAHGGAERA

SEQ ID NO: 1243 - protein, 15 aa, synthetic construct
GGFCCPSPQRRHHVD

SEQ ID NO: 1244 - protein, 15 aa, synthetic construct
GGGAAAAQAHGGLPG

SEQ ID NO: 1245 - protein, 15 aa, synthetic construct
GGGAHGAPRRQAGGA

SEQ ID NO: 1246 - protein, 15 aa, synthetic construct
GGGFGGRGGLGRRCS

SEQ ID NO: 1247 - protein, 15 aa, synthetic construct
GGGGGAVRRGRCPGH

SEQ ID NO: 1248 - protein, 15 aa, synthetic construct
GGGGGGRGHDAGGAA

SEQ ID NO: 1249 - protein, 15 aa, synthetic construct
GGGGGSWCGLRAAGS

SEQ ID NO: 1250 - protein, 15 aa, synthetic construct
GGGGGTGTGPGPEHH

SEQ ID NO: 1251 - protein, 15 aa, synthetic construct
GGGGRPERGAGGPAP

SEQ ID NO: 1252 - protein, 15 aa, synthetic construct
GGGGVFEAARRTWKP

SEQ ID NO: 1253 - protein, 15 aa, synthetic construct
GGGLACLCAGPTATG

SEQ ID NO: 1254 - protein, 15 aa, synthetic construct
GGGPGGRAAGAVVVT

SEQ ID NO: 1255 - protein, 15 aa, synthetic construct
GGGRERDERGGRAGP

SEQ ID NO: 1256 - protein, 15 aa, synthetic construct
GGGRPGQGAGAAPAV

SEQ ID NO: 1257 - protein, 15 aa, synthetic construct
GGGSCGGGGGQRLPA

SEQ ID NO: 1258 - protein, 15 aa, synthetic construct
GGGSGVRVLAGAGAG

SEQ ID NO: 1259 - protein, 15 aa, synthetic construct
GGGVPGALHTEPRHP

SEQ ID NO: 1260 - protein, 15 aa, synthetic construct
GGHCHLAVPPGGAHQ

SEQ ID NO: 1261 - protein, 15 aa, synthetic construct
GGHPPPRRHPGAHPC

SEQ ID NO: 1262 - protein, 15 aa, synthetic construct
GGHRFGGWRGCGGCA

SEQ ID NO: 1263 - protein, 15 aa, synthetic construct
GGIPKVSGSRGLEPR

SEQ ID NO: 1264 - protein, 15 aa, synthetic construct
GGLGGGGGGGVRGSG

SEQ ID NO: 1265 - protein, 15 aa, synthetic construct
GGLRAGPKGTPEAER

SEQ ID NO: 1266 - protein, 15 aa, synthetic construct
GGPCPADYSAWRREA

SEQ ID NO: 1267 - protein, 15 aa, synthetic construct
GGPGFAATGVVSTLA

SEQ ID NO: 1268 - protein, 15 aa, synthetic construct
GGPGGVLLHHQNPVR

SEQ ID NO: 1269 - protein, 15 aa, synthetic construct
GGPGVRGIAAAPAAA

SEQ ID NO: 1270 - protein, 15 aa, synthetic construct
GGPHALYCRAAASRV

SEQ ID NO: 1271 - protein, 15 aa, synthetic construct
GGPRAAAAAAAAGSA

SEQ ID NO: 1272 - protein, 15 aa, synthetic construct
GGPVLKDLCAPLQRG

SEQ ID NO: 1273 - protein, 15 aa, synthetic construct
GGPWRCSGCSGRSGR

SEQ ID NO: 1274 - protein, 15 aa, synthetic construct
GGQQRAPVSGARAWG

SEQ ID NO: 1275 - protein, 15 aa, synthetic construct
GGRAGACADLRVGAA

SEQ ID NO: 1276 - protein, 15 aa, synthetic construct
GGRAGACCVLADRGL

SEQ ID NO: 1277 - protein, 15 aa, synthetic construct
GGRAPGIAGALLGPP

SEQ ID NO: 1278 - protein, 15 aa, synthetic construct
GGRGAERGQPHHPAA

SEQ ID NO: 1279 - protein, 15 aa, synthetic construct
GGRGAPAAAGADGPS

SEQ ID NO: 1280 - protein, 15 aa, synthetic construct
GGRGDREPDPWEVGA

SEQ ID NO: 1281 - protein, 15 aa, synthetic construct
GGRGGLPGGQAAAAA

SEQ ID NO: 1282 - protein, 15 aa, synthetic construct
GGRGTPAPALPQRLV

SEQ ID NO: 1283 - protein, 15 aa, synthetic construct
GGRGVGIGRGACVPS

SEQ ID NO: 1284 - protein, 15 aa, synthetic construct
GGRNPLQAAEQPPGA

SEQ ID NO: 1285 - protein, 15 aa, synthetic construct
GGRPGHVAAFCSGSS

SEQ ID NO: 1286 - protein, 15 aa, synthetic construct
GGSAKVATLQKAGPA

SEQ ID NO: 1287 - protein, 15 aa, synthetic construct
GGSGGGSGPGGGGPG

SEQ ID NO: 1288 - protein, 15 aa, synthetic construct
GGSGNQALRGVAAGP

SEQ ID NO: 1289 - protein, 15 aa, synthetic construct
GGSPQQLGAAQPLRG

SEQ ID NO: 1290 - protein, 15 aa, synthetic construct
GGSRRGALDPFEPVC

SEQ ID NO: 1291 - protein, 15 aa, synthetic construct
GGVEAGAKPGAAAIP

SEQ ID NO: 1292 - protein, 15 aa, synthetic construct
GGVHGHGAAQRQPAG

SEQ ID NO: 1293 - protein, 15 aa, synthetic construct
GGVRAGHLPLDRCLQ

SEQ ID NO: 1294 - protein, 15 aa, synthetic construct
GGVWGTPEAVARGGG

SEQ ID NO: 1295 - protein, 15 aa, synthetic construct
GGWSGGGTAAPAAGG

SEQ ID NO: 1296 - protein, 15 aa, synthetic construct
GHEPPRADRASGAPA

SEQ ID NO: 1297 - protein, 15 aa, synthetic construct
GHGAGQRAGHARLRG

SEQ ID NO: 1298 - protein, 15 aa, synthetic construct
GHGGLLALPGAAGVG

SEQ ID NO: 1299 - protein, 15 aa, synthetic construct
GHGHPRLEATRLVPA

SEQ ID NO: 1300 - protein, 15 aa, synthetic construct
GHHHLHPLHGRVPAL

SEQ ID NO: 1301 - protein, 15 aa, synthetic construct
GHIFWPQPRAYGPGP

SEQ ID NO: 1302 - protein, 15 aa, synthetic construct
GHLWTPELHRAQPSR

SEQ ID NO: 1303 - protein, 15 aa, synthetic construct
GHPVPASPRRGTAGR

SEQ ID NO: 1304 - protein, 15 aa, synthetic construct
GHRLERAQPPHAHVP

SEQ ID NO: 1305 - protein, 15 aa, synthetic construct
GHTGGTSKCSSGHAN

SEQ ID NO: 1306 - protein, 15 aa, synthetic construct
GIPFPDWRERFLHYA

SEQ ID NO: 1307 - protein, 15 aa, synthetic construct
GIPQNRNYCGPLSGP

SEQ ID NO: 1308 - protein, 15 aa, synthetic construct
GIPSAAPGSLFRASG

SEQ ID NO: 1309 - protein, 15 aa, synthetic construct
GKPEIHLLLHRCSRP

SEQ ID NO: 1310 - protein, 15 aa, synthetic construct
GLAGDPGVLRPAPVE

SEQ ID NO: 1311 - protein, 15 aa, synthetic construct
GLAGGGTPLGWRECG

SEQ ID NO: 1312 - protein, 15 aa, synthetic construct
GLALSSGKALLPELA

SEQ ID NO: 1313 - protein, 15 aa, synthetic construct
GLFPYPPDAPSQGCN

SEQ ID NO: 1314 - protein, 15 aa, synthetic construct
GLGAARGAAARGCAV

SEQ ID NO: 1315 - protein, 15 aa, synthetic construct
GLGGEGGRHLRLQPA

SEQ ID NO: 1316 - protein, 15 aa, synthetic construct
GLGGPGGGAGFRAGW

SEQ ID NO: 1317 - protein, 15 aa, synthetic construct
GLGPGERQRVWRAEQ

SEQ ID NO: 1318 - protein, 15 aa, synthetic construct
GLGRPGGPAGGPTAT

SEQ ID NO: 1319 - protein, 15 aa, synthetic construct
GLPAPAAAAALEERD

SEQ ID NO: 1320 - protein, 15 aa, synthetic construct
GLPAPRDLLLPHAGR

SEQ ID NO: 1321 - protein, 15 aa, synthetic construct
GLPDPSGRRPPGPAA

SEQ ID NO: 1322 - protein, 15 aa, synthetic construct
GLPEPGGPERDPRRW

SEQ ID NO: 1323 - protein, 15 aa, synthetic construct
GLPGPPHRPSPGSRP

SEQ ID NO: 1324 - protein, 15 aa, synthetic construct
GLPHPWQSGDGGLGN

SEQ ID NO: 1325 - protein, 15 aa, synthetic construct
GLPLPYSKLDHIPLP

SEQ ID NO: 1326 - protein, 15 aa, synthetic construct
GLPPAIPPWAAPGLE

SEQ ID NO: 1327 - protein, 15 aa, synthetic construct
GLPQPGPGPGRARKR

SEQ ID NO: 1328 - protein, 15 aa, synthetic construct
GLPRALRPGLPDHAR

SEQ ID NO: 1329 - protein, 15 aa, synthetic construct
GLPVPQLPSDGDLPV

SEQ ID NO: 1330 - protein, 15 aa, synthetic construct
GLPVRAGGGFPGRRG

SEQ ID NO: 1331 - protein, 15 aa, synthetic construct
GLSLGCAAAARGSLE

SEQ ID NO: 1332 - protein, 15 aa, synthetic construct
GLTALHGGGAWEVPA

SEQ ID NO: 1333 - protein, 15 aa, synthetic construct
GMGPVPPGAQCRARA

SEQ ID NO: 1334 - protein, 15 aa, synthetic construct
GMYSERRGESRPRAE

SEQ ID NO: 1335 - protein, 15 aa, synthetic construct
GNGSQHVARPPGRGA

SEQ ID NO: 1336 - protein, 15 aa, synthetic construct
GNRDPLELQPRQRLP

SEQ ID NO: 1337 - protein, 15 aa, synthetic construct
GNRGAARERDAGVAE

SEQ ID NO: 1338 - protein, 15 aa, synthetic construct
GPAAAGRPAAAAAFA

SEQ ID NO: 1339 - protein, 15 aa, synthetic construct
GPAAPAAAAGQWSGR

SEQ ID NO: 1340 - protein, 15 aa, synthetic construct
GPASPSSTHRPAAPR

SEQ ID NO: 1341 - protein, 15 aa, synthetic construct
GPATILRPGSPRPTA

SEQ ID NO: 1342 - protein, 15 aa, synthetic construct
GPCPGARAGTHLPAL

SEQ ID NO: 1343 - protein, 15 aa, synthetic construct
GPCPGPGALGTQRAA

SEQ ID NO: 1344 - protein, 15 aa, synthetic construct
GPCPPPGCGVGPGPS

SEQ ID NO: 1345 - protein, 15 aa, synthetic construct
GPEESPGRWVAGTGP

SEQ ID NO: 1346 - protein, 15 aa, synthetic construct
GPEQRAAAAGAPGGR

SEQ ID NO: 1347 - protein, 15 aa, synthetic construct
GPGDDAQGFSPAPGA

SEQ ID NO: 1348 - protein, 15 aa, synthetic construct
GPGERRAGAEPPGQN

SEQ ID NO: 1349 - protein, 15 aa, synthetic construct
GPGGERAAAGVGRGA

SEQ ID NO: 1350 - protein, 15 aa, synthetic construct
GPGRGAAEDRQKAGE

SEQ ID NO: 1351 - protein, 15 aa, synthetic construct
GPGRRQPPGGDPRGA

SEQ ID NO: 1352 - protein, 15 aa, synthetic construct
GPGSSPGGSPGPSRS

SEQ ID NO: 1353 - protein, 15 aa, synthetic construct
GPLPALGLSPQPAAG

SEQ ID NO: 1354 - protein, 15 aa, synthetic construct
GPLPHPRGHRGLALL

SEQ ID NO: 1355 - protein, 15 aa, synthetic construct
GPLPLALPRLPGWRA

SEQ ID NO: 1356 - protein, 15 aa, synthetic construct
GPNQADCAQVNGWQG

SEQ ID NO: 1357 - protein, 15 aa, synthetic construct
GPPDRRQCWGRATSA

SEQ ID NO: 1358 - protein, 15 aa, synthetic construct
GPPHPLELLPLLPAD

SEQ ID NO: 1359 - protein, 15 aa, synthetic construct
GPPPRRAPMRSGHGA

SEQ ID NO: 1360 - protein, 15 aa, synthetic construct
GPRPGPPAPCALGRH

SEQ ID NO: 1361 - protein, 15 aa, synthetic construct
GPRPQPRAPRPTPDA

SEQ ID NO: 1362 - protein, 15 aa, synthetic construct
GPSAASLRAANPLAV

SEQ ID NO: 1363 - protein, 15 aa, synthetic construct
GPSGRRGPGAGGRGA

SEQ ID NO: 1364 - protein, 15 aa, synthetic construct
GPSPALAPAVDGRGS

SEQ ID NO: 1365 - protein, 15 aa, synthetic construct
GPSPWQSGRPPLAAP

SEQ ID NO: 1366 - protein, 15 aa, synthetic construct
GPTLEASCTPPGPPA

SEQ ID NO: 1367 - protein, 15 aa, synthetic construct
GPVASSAEPPRPRPL

SEQ ID NO: 1368 - protein, 15 aa, synthetic construct
GQAAPSHFGLHCGQL

SEQ ID NO: 1369 - protein, 15 aa, synthetic construct
GQDHRPLPHPGQQLV

SEQ ID NO: 1370 - protein, 15 aa, synthetic construct
GQERRQWPQERGEAR

SEQ ID NO: 1371 - protein, 15 aa, synthetic construct
GQGLAQPLGRVAQEA

SEQ ID NO: 1372 - protein, 15 aa, synthetic construct
GQLGRHYSDQQGGGS

SEQ ID NO: 1373 - protein, 15 aa, synthetic construct
GQPPLAEAARGERRA

SEQ ID NO: 1374 - protein, 15 aa, synthetic construct
GQPVPVLSASNLAAA

SEQ ID NO: 1375 - protein, 15 aa, synthetic construct
GQQQLDQCVPFCSLG

SEQ ID NO: 1376 - protein, 15 aa, synthetic construct
GQRGGAGAGAGAARA

SEQ ID NO: 1377 - protein, 15 aa, synthetic construct
GQRGTCQPSPCGVHS

SEQ ID NO: 1378 - protein, 15 aa, synthetic construct
GQSVRAGPGGALGLA

SEQ ID NO: 1379 - protein, 15 aa, synthetic construct
GQTIQCRRGEEERPL

SEQ ID NO: 1380 - protein, 15 aa, synthetic construct
GQYLQGPGAGAPGAG

SEQ ID NO: 1381 - protein, 15 aa, synthetic construct
GRAAAAAPCPPPGSR

SEQ ID NO: 1382 - protein, 15 aa, synthetic construct
GRAGGPAGGGGAARA

SEQ ID NO: 1383 - protein, 15 aa, synthetic construct
GRASGGVWEPDSGAA

SEQ ID NO: 1384 - protein, 15 aa, synthetic construct
GREGVHQGAGPVDRA

SEQ ID NO: 1385 - protein, 15 aa, synthetic construct
GREPQLGEPPHQELQ

SEQ ID NO: 1386 - protein, 15 aa, synthetic construct
GRGAEHGERRRRAPG

SEQ ID NO: 1387 - protein, 15 aa, synthetic construct
GRGIPGIGRRPLPAP

SEQ ID NO: 1388 - protein, 15 aa, synthetic construct
GRGQCLGGGAPARQP

SEQ ID NO: 1389 - protein, 15 aa, synthetic construct
GRGSGAWPGGLETPK

SEQ ID NO: 1390 - protein, 15 aa, synthetic construct
GRIPPAVIPHHSLTV

SEQ ID NO: 1391 - protein, 15 aa, synthetic construct
GRLACPVAGPSALGF

SEQ ID NO: 1392 - protein, 15 aa, synthetic construct
GRMEGAGAASGKGRA

SEQ ID NO: 1393 - protein, 15 aa, synthetic construct
GRNGGTGVRQPLPGL

SEQ ID NO: 1394 - protein, 15 aa, synthetic construct
GRPAAPRAIAPRPAA

SEQ ID NO: 1395 - protein, 15 aa, synthetic construct
GRPACPAVLRPRPAE

SEQ ID NO: 1396 - protein, 15 aa, synthetic construct
GRPAGAALQPHLRAA

SEQ ID NO: 1397 - protein, 15 aa, synthetic construct
GRPAGPVPHRRHRPV

SEQ ID NO: 1398 - protein, 15 aa, synthetic construct
GRPAPRSAPPTAHLA

SEQ ID NO: 1399 - protein, 15 aa, synthetic construct
GRPELRGLYRTARGS

SEQ ID NO: 1400 - protein, 15 aa, synthetic construct
GRPGLGLQRSLGRTG

SEQ ID NO: 1401 - protein, 15 aa, synthetic construct
GRPGPVSSGLVLGQP

SEQ ID NO: 1402 - protein, 15 aa, synthetic construct
GRPGRGGGGRGTRPG

SEQ ID NO: 1403 - protein, 15 aa, synthetic construct
GRPLTPQERLLPRLP

SEQ ID NO: 1404 - protein, 15 aa, synthetic construct
GRPPRGASGAHGRAE

SEQ ID NO: 1405 - protein, 15 aa, synthetic construct
GRPQLLQDGGGLLRS

SEQ ID NO: 1406 - protein, 15 aa, synthetic construct
GRPQPRLLSARPPGA

SEQ ID NO: 1407 - protein, 15 aa, synthetic construct
GRPRPTGAGGHGRRA

SEQ ID NO: 1408 - protein, 15 aa, synthetic construct
GRPRPVHQPPGGGHL

SEQ ID NO: 1409 - protein, 15 aa, synthetic construct
GRPRPVPPDPPSVPG

SEQ ID NO: 1410 - protein, 15 aa, synthetic construct
GRPSPRPQPGRHRPV

SEQ ID NO: 1411 - protein, 15 aa, synthetic construct
GRPSRPPALRPDPRP

SEQ ID NO: 1412 - protein, 15 aa, synthetic construct
GRPVGPGTAAGAAGP

SEQ ID NO: 1413 - protein, 15 aa, synthetic construct
GRPVPPGPAAAAAAA

SEQ ID NO: 1414 - protein, 15 aa, synthetic construct
GRPYPLESAQRAPPG

SEQ ID NO: 1415 - protein, 15 aa, synthetic construct
GRQYNIHQRVPPTGI

SEQ ID NO: 1416 - protein, 15 aa, synthetic construct
GRSGGGGGRGSSSWS

SEQ ID NO: 1417 - protein, 15 aa, synthetic construct
GRSGGGSGTTPLGTS

SEQ ID NO: 1418 - protein, 15 aa, synthetic construct
GRSIQDAADSGRGEP

SEQ ID NO: 1419 - protein, 15 aa, synthetic construct
GRSRAQQEAAAGAAA

SEQ ID NO: 1420 - protein, 15 aa, synthetic construct
GRTDLARGLSLPPPS

SEQ ID NO: 1421 - protein, 15 aa, synthetic construct
GRTGPGAAAASAGPV

SEQ ID NO: 1422 - protein, 15 aa, synthetic construct
GRVPPAPAGAAPRSV

SEQ ID NO: 1423 - protein, 15 aa, synthetic construct
GSAPPRPWKSGGHTW

SEQ ID NO: 1424 - protein, 15 aa, synthetic construct
GSCAAGRAAARDPRG

SEQ ID NO: 1425 - protein, 15 aa, synthetic construct
GSCAPPRSWPPRPSR

SEQ ID NO: 1426 - protein, 15 aa, synthetic construct
GSCRCLQEQRVEPRS

SEQ ID NO: 1427 - protein, 15 aa, synthetic construct
GSDGACGRRWTLVGT

SEQ ID NO: 1428 - protein, 15 aa, synthetic construct
GSGERRSGACAAHSS

SEQ ID NO: 1429 - protein, 15 aa, synthetic construct
GSGGRRRAWWGLCGD

SEQ ID NO: 1430 - protein, 15 aa, synthetic construct
GSGPRPRAATAAAAA

SEQ ID NO: 1431 - protein, 15 aa, synthetic construct
GSHKERRADPGGEGA

SEQ ID NO: 1432 - protein, 15 aa, synthetic construct
GSLAPSPRTARPTSL

SEQ ID NO: 1433 - protein, 15 aa, synthetic construct
GSLPPDRRAPSALSS

SEQ ID NO: 1434 - protein, 15 aa, synthetic construct
GSLPPGLWGGGNFPG

SEQ ID NO: 1435 - protein, 15 aa, synthetic construct
GSPAPQPCPGVRAAG

SEQ ID NO: 1436 - protein, 15 aa, synthetic construct
GSPDPIVCQPSTGAH

SEQ ID NO: 1437 - protein, 15 aa, synthetic construct
GSPKPAPAVCPPAQR

SEQ ID NO: 1438 - protein, 15 aa, synthetic construct
GSPRCPTAAAAGAVA

SEQ ID NO: 1439 - protein, 15 aa, synthetic construct
GSPRPRTRAAARPRT

SEQ ID NO: 1440 - protein, 15 aa, synthetic construct
GSPVPQPLAPSVDPG

SEQ ID NO: 1441 - protein, 15 aa, synthetic construct
GSQRVLSSSGSCFGC

SEQ ID NO: 1442 - protein, 15 aa, synthetic construct
GSRDSERGRSRGPTA

SEQ ID NO: 1443 - protein, 15 aa, synthetic construct
GSSAEGRNQGARGQR

SEQ ID NO: 1444 - protein, 15 aa, synthetic construct
GSSPATVWGALLPFP

SEQ ID NO: 1445 - protein, 15 aa, synthetic construct
GSSPFSPGAGGRRDR

SEQ ID NO: 1446 - protein, 15 aa, synthetic construct
GSWSKKCLCLSHRHW

SEQ ID NO: 1447 - protein, 15 aa, synthetic construct
GSYHVPGYAAGMENR

SEQ ID NO: 1448 - protein, 15 aa, synthetic construct
GSYRAPRAHTGRPSP

SEQ ID NO: 1449 - protein, 15 aa, synthetic construct
GTNFPNSDYNPGLPC

SEQ ID NO: 1450 - protein, 15 aa, synthetic construct
GTPALWLPAQPSRHG

SEQ ID NO: 1451 - protein, 15 aa, synthetic construct
GTPAPVLRSGNHPPR

SEQ ID NO: 1452 - protein, 15 aa, synthetic construct
GTPAQRGSGPRAGSC

SEQ ID NO: 1453 - protein, 15 aa, synthetic construct
GTPHPGAPAASCQRR

SEQ ID NO: 1454 - protein, 15 aa, synthetic construct
GTPIPARPLNAAAAA

SEQ ID NO: 1455 - protein, 15 aa, synthetic construct
GTPLPGWVHSHDGEY

SEQ ID NO: 1456 - protein, 15 aa, synthetic construct
GTPLPRTPGSGAARG

SEQ ID NO: 1457 - protein, 15 aa, synthetic construct
GTRSTWPSSSCPRCP

SEQ ID NO: 1458 - protein, 15 aa, synthetic construct
GTTEHHTGINVCPLR

SEQ ID NO: 1459 - protein, 15 aa, synthetic construct
GVAGIGLTWTDDPLS

SEQ ID NO: 1460 - protein, 15 aa, synthetic construct
GVAHREGLPSGQGGR

SEQ ID NO: 1461 - protein, 15 aa, synthetic construct
GVCWLVAAAWAFRGL

SEQ ID NO: 1462 - protein, 15 aa, synthetic construct
GVGQDGASQERSERC

SEQ ID NO: 1463 - protein, 15 aa, synthetic construct
GVLFQGEVAQRAQGA

SEQ ID NO: 1464 - protein, 15 aa, synthetic construct
GVLSGGGRGDCGGAG

SEQ ID NO: 1465 - protein, 15 aa, synthetic construct
GVPRPASGAWRTPRA

SEQ ID NO: 1466 - protein, 15 aa, synthetic construct
GVPSCPAEGERVPVG

SEQ ID NO: 1467 - protein, 15 aa, synthetic construct
GVPVPERDHVPGAAL

SEQ ID NO: 1468 - protein, 15 aa, synthetic construct
GVPWPGSESAEGYGA

SEQ ID NO: 1469 - protein, 15 aa, synthetic construct
GVQPQGRAAVLHLPE

SEQ ID NO: 1470 - protein, 15 aa, synthetic construct
GVQSRAWLALSSGHV

SEQ ID NO: 1471 - protein, 15 aa, synthetic construct
GVSQWEGSPGAGGSW

SEQ ID NO: 1472 - protein, 15 aa, synthetic construct
GVVDAAEWAEGGGQR

SEQ ID NO: 1473 - protein, 15 aa, synthetic construct
GVWAPGRPRAAAPAP

SEQ ID NO: 1474 - protein, 15 aa, synthetic construct
GVWRALSLGDPSCPV

SEQ ID NO: 1475 - protein, 15 aa, synthetic construct
GWASRAWPSPRPCCS

SEQ ID NO: 1476 - protein, 15 aa, synthetic construct
GWMGTAEMAAAARTP

SEQ ID NO: 1477 - protein, 15 aa, synthetic construct
GWPGFQLGPGPPERG

SEQ ID NO: 1478 - protein, 15 aa, synthetic construct
GWPLGAGGHGPAASP

SEQ ID NO: 1479 - protein, 15 aa, synthetic construct
GWSCAGLGDRGEAPD

SEQ ID NO: 1480 - protein, 15 aa, synthetic construct
GWSCSAFSSGFHGRL

SEQ ID NO: 1481 - protein, 15 aa, synthetic construct
GYPAADCAASSQWNA

SEQ ID NO: 1482 - protein, 15 aa, synthetic construct
HAGRRPPVQPLRLGP

SEQ ID NO: 1483 - protein, 15 aa, synthetic construct
HAQLFQREQLNEHHL

SEQ ID NO: 1484 - protein, 15 aa, synthetic construct
HDRPEIPADSGRGRL

SEQ ID NO: 1485 - protein, 15 aa, synthetic construct
HFHPPRRANPTLPCF

SEQ ID NO: 1486 - protein, 15 aa, synthetic construct
HGAAHRAELWHREGE

SEQ ID NO: 1487 - protein, 15 aa, synthetic construct
HGSSLAVSGSLGLTL

SEQ ID NO: 1488 - protein, 15 aa, synthetic construct
HHPAHAGRPAVHPAL

SEQ ID NO: 1489 - protein, 15 aa, synthetic construct
HLLHQCDWEWSRSDD

SEQ ID NO: 1490 - protein, 15 aa, synthetic construct
HLPGPGEPGLRALLL

SEQ ID NO: 1491 - protein, 15 aa, synthetic construct
HLRAVSGVQPEPPAG

SEQ ID NO: 1492 - protein, 15 aa, synthetic construct
HLRHGPQRGQPECGA

SEQ ID NO: 1493 - protein, 15 aa, synthetic construct
HPASFLGNPDRTHWD

SEQ ID NO: 1494 - protein, 15 aa, synthetic construct
HPGPARRALAEVDGQ

SEQ ID NO: 1495 - protein, 15 aa, synthetic construct
HPLCPPRPAVCAAQR

SEQ ID NO: 1496 - protein, 15 aa, synthetic construct
HPPAPECPRKGPRWG

SEQ ID NO: 1497 - protein, 15 aa, synthetic construct
HPRGPRGQGATHSHS

SEQ ID NO: 1498 - protein, 15 aa, synthetic construct
HRAPGDLGPPRLPLL

SEQ ID NO: 1499 - protein, 15 aa, synthetic construct
HREGQPILHPAAEEG

SEQ ID NO: 1500 - protein, 15 aa, synthetic construct
HRGRWESDASLQFRC

SEQ ID NO: 1501 - protein, 15 aa, synthetic construct
HRLPGLCQSDVLLLQ

SEQ ID NO: 1502 - protein, 15 aa, synthetic construct
HRPPSHSHDDRGLPS

SEQ ID NO: 1503 - protein, 15 aa, synthetic construct
HSHEPWGRRHSWDRR

SEQ ID NO: 1504 - protein, 15 aa, synthetic construct
HTDSLCSTPPHPHVH

SEQ ID NO: 1505 - protein, 15 aa, synthetic construct
HVRGREAAVHRRGQA

SEQ ID NO: 1506 - protein, 15 aa, synthetic construct
HWPPGATTARRWPTA

SEQ ID NO: 1507 - protein, 15 aa, synthetic construct
HWQLCAGAAWRPQRN

SEQ ID NO: 1508 - protein, 15 aa, synthetic construct
IFDGPYPIGRSMMGW

SEQ ID NO: 1509 - protein, 15 aa, synthetic construct
ISSFPPAPPTRGWPC

SEQ ID NO: 1510 - protein, 15 aa, synthetic construct
ITLAVRLGQPAEGQG

SEQ ID NO: 1511 - protein, 15 aa, synthetic construct
KAGSASCSRSSSGSL

SEQ ID NO: 1512 - protein, 15 aa, synthetic construct
KEERGPRPTVAGRRT

SEQ ID NO: 1513 - protein, 15 aa, synthetic construct
KKFGNFSSGGCWELS

SEQ ID NO: 1514 - protein, 15 aa, synthetic construct
KPGGRGGEAAALPGA

SEQ ID NO: 1515 - protein, 15 aa, synthetic construct
KWGGAQTAGGKEVSG

SEQ ID NO: 1516 - protein, 15 aa, synthetic construct
LAAAPCSAPGPQIPG

SEQ ID NO: 1517 - protein, 15 aa, synthetic construct
LACGACALLRTGPGG

SEQ ID NO: 1518 - protein, 15 aa, synthetic construct
LALPGGERGRQAQGA

SEQ ID NO: 1519 - protein, 15 aa, synthetic construct
LALRSQSTAPPGPAL

SEQ ID NO: 1520 - protein, 15 aa, synthetic construct
LAQARHPAPGSPLRP

SEQ ID NO: 1521 - protein, 15 aa, synthetic construct
LASAPRSLEGGERPA

SEQ ID NO: 1522 - protein, 15 aa, synthetic construct
LASGPLMQTTSWPCS

SEQ ID NO: 1523 - protein, 15 aa, synthetic construct
LASSTARQTSIACCA

SEQ ID NO: 1524 - protein, 15 aa, synthetic construct
LCAIRLSGAEAIVTL

SEQ ID NO: 1525 - protein, 15 aa, synthetic construct
LCGPLWGSWWRGLWL

SEQ ID NO: 1526 - protein, 15 aa, synthetic construct
LCRPAGRAGEASKPG

SEQ ID NO: 1527 - protein, 15 aa, synthetic construct
LCSPEPPRRPPAAEA

SEQ ID NO: 1528 - protein, 15 aa, synthetic construct
LDLPRPGRHRPGGRQ

SEQ ID NO: 1529 - protein, 15 aa, synthetic construct
LEGRDGADARGAAVL

SEQ ID NO: 1530 - protein, 15 aa, synthetic construct
LFKGWPGEAGRVGPP

SEQ ID NO: 1531 - protein, 15 aa, synthetic construct
LGLVSSWDGASLRPA

SEQ ID NO: 1532 - protein, 15 aa, synthetic construct
LGPGTARRRPAAGAG

SEQ ID NO: 1533 - protein, 15 aa, synthetic construct
LIGAKRSPSSGTGLC

SEQ ID NO: 1534 - protein, 15 aa, synthetic construct
LLGHGRQPAGGLWPR

SEQ ID NO: 1535 - protein, 15 aa, synthetic construct
LLHRGGRCRDPPQVH

SEQ ID NO: 1536 - protein, 15 aa, synthetic construct
LLPQPHPHHPVHGPA

SEQ ID NO: 1537 - protein, 15 aa, synthetic construct
LLPSLAARGGVAGRS

SEQ ID NO: 1538 - protein, 15 aa, synthetic construct
LMGRPPGPTPTISAC

SEQ ID NO: 1539 - protein, 15 aa, synthetic construct
LMTIAPRPGGRSSPP

SEQ ID NO: 1540 - protein, 15 aa, synthetic construct
LPAGGRALRDDGRPG

SEQ ID NO: 1541 - protein, 15 aa, synthetic construct
LPGAPCGAGRRQPLL

SEQ ID NO: 1542 - protein, 15 aa, synthetic construct
LQAESLPFARREAAP

SEQ ID NO: 1543 - protein, 15 aa, synthetic construct
LQCQAPGQPLGPVRR

SEQ ID NO: 1544 - protein, 15 aa, synthetic construct
LQGAGDRRVPGALRG

SEQ ID NO: 1545 - protein, 15 aa, synthetic construct
LQHHLGHHPGSWPLP

SEQ ID NO: 1546 - protein, 15 aa, synthetic construct
LQVPAAQKEQGGARQ

SEQ ID NO: 1547 - protein, 15 aa, synthetic construct
LRDLQAPGRAVEAAG

SEQ ID NO: 1548 - protein, 15 aa, synthetic construct
LRGDGSGETGPGRVA

SEQ ID NO: 1549 - protein, 15 aa, synthetic construct
LRPCGSSGCNCGSWP

SEQ ID NO: 1550 - protein, 15 aa, synthetic construct
LRPPARGHAELPAAV

SEQ ID NO: 1551 - protein, 15 aa, synthetic construct
LRRMAEASATGRCTC

SEQ ID NO: 1552 - protein, 15 aa, synthetic construct
LRRTRPRGAPAFTAI

SEQ ID NO: 1553 - protein, 15 aa, synthetic construct
LRVLPPRPPAARAEG

SEQ ID NO: 1554 - protein, 15 aa, synthetic construct
LSACTFSWSQCSCRA

SEQ ID NO: 1555 - protein, 15 aa, synthetic construct
LSLARDLPHSWQHWN

SEQ ID NO: 1556 - protein, 15 aa, synthetic construct
LSQGVCWWKQLQQWK

SEQ ID NO: 1557 - protein, 15 aa, synthetic construct
LSRDAAGAARSMATA

SEQ ID NO: 1558 - protein, 15 aa, synthetic construct
LSRPLPPHQQAGRRR

SEQ ID NO: 1559 - protein, 15 aa, synthetic construct
LSSPGMRVAPQVGRL

SEQ ID NO: 1560 - protein, 15 aa, synthetic construct
LSSRAGARGRAAPGG

SEQ ID NO: 1561 - protein, 15 aa, synthetic construct
LTHVRNQYFWQLGHH

SEQ ID NO: 1562 - protein, 15 aa, synthetic construct
LTYTPRSSCRPSCGA

SEQ ID NO: 1563 - protein, 15 aa, synthetic construct
MNLPQCPALRAGSTT

SEQ ID NO: 1564 - protein, 15 aa, synthetic construct
MPGPALAKCARDCSG

SEQ ID NO: 1565 - protein, 15 aa, synthetic construct
MTTRSPARSWGWAST

SEQ ID NO: 1566 - protein, 15 aa, synthetic construct
NCRGGPKQEASVQAG

SEQ ID NO: 1567 - protein, 15 aa, synthetic construct
NGGASCSPRPHPAAP

SEQ ID NO: 1568 - protein, 15 aa, synthetic construct
PAAAAAPGPRAADRD

SEQ ID NO: 1569 - protein, 15 aa, synthetic construct
PAAAASCSFRLSATA

SEQ ID NO: 1570 - protein, 15 aa, synthetic construct
PAAAPAALPAARSLF

SEQ ID NO: 1571 - protein, 15 aa, synthetic construct
PAAGLLWPWPGRQSS

SEQ ID NO: 1572 - protein, 15 aa, synthetic construct
PAAPSSRGLPGLSRR

SEQ ID NO: 1573 - protein, 15 aa, synthetic construct
PACLSGPHGRPRTGT

SEQ ID NO: 1574 - protein, 15 aa, synthetic construct
PAGARASGPGAGAAE

SEQ ID NO: 1575 - protein, 15 aa, synthetic construct
PAGNPHALCPPLRGA

SEQ ID NO: 1576 - protein, 15 aa, synthetic construct
PAGRTCPLCHCPPAG

SEQ ID NO: 1577 - protein, 15 aa, synthetic construct
PALGRAHGPRRPPAS

SEQ ID NO: 1578 - protein, 15 aa, synthetic construct
PAPAGRGVQAGGARA

SEQ ID NO: 1579 - protein, 15 aa, synthetic construct
PAPRSLGTRQAVPDA

SEQ ID NO: 1580 - protein, 15 aa, synthetic construct
PAPTWAASTSGRANC

SEQ ID NO: 1581 - protein, 15 aa, synthetic construct
PAVGHGLRVPQRPGR

SEQ ID NO: 1582 - protein, 15 aa, synthetic construct
PAVRAPGAAFSAGCH

SEQ ID NO: 1583 - protein, 15 aa, synthetic construct
PAWPPGGHHRCPVYH

SEQ ID NO: 1584 - protein, 15 aa, synthetic construct
PCLGLPSKPPLGRQW

SEQ ID NO: 1585 - protein, 15 aa, synthetic construct
PCSLVSAHSACLWRT

SEQ ID NO: 1586 - protein, 15 aa, synthetic construct
PDAALRHQHRGARAA

SEQ ID NO: 1587 - protein, 15 aa, synthetic construct
PDRAGPGAGAGGAGA

SEQ ID NO: 1588 - protein, 15 aa, synthetic construct
PDRWWPPLEPGSAVA

SEQ ID NO: 1589 - protein, 15 aa, synthetic construct
PEEEAAAAAAPQGQA

SEQ ID NO: 1590 - protein, 15 aa, synthetic construct
PERALLHQATSVRGH

SEQ ID NO: 1591 - protein, 15 aa, synthetic construct
PFSGGLRPLPSASAG

SEQ ID NO: 1592 - protein, 15 aa, synthetic construct
PGAAAAAAPAAVPAV

SEQ ID NO: 1593 - protein, 15 aa, synthetic construct
PGAAAASTRAGARRL

SEQ ID NO: 1594 - protein, 15 aa, synthetic construct
PGAGCWWWGRAASAA

SEQ ID NO: 1595 - protein, 15 aa, synthetic construct
PGAPRRCCWSGWRCW

SEQ ID NO: 1596 - protein, 15 aa, synthetic construct
PGCAAGCQCSPASAS

SEQ ID NO: 1597 - protein, 15 aa, synthetic construct
PGGHGIPGVGPERGW

SEQ ID NO: 1598 - protein, 15 aa, synthetic construct
PGGTQQRAGREHRHL

SEQ ID NO: 1599 - protein, 15 aa, synthetic construct
PGKDQQCWGQLWKPQ

SEQ ID NO: 1600 - protein, 15 aa, synthetic construct
PGLDWSEPCPWTTRA

SEQ ID NO: 1601 - protein, 15 aa, synthetic construct
PGPAAAAPHPCPAAP

SEQ ID NO: 1602 - protein, 15 aa, synthetic construct
PGPAHLPVSLALRGR

SEQ ID NO: 1603 - protein, 15 aa, synthetic construct
PGPGGGGGGGGAVQH

SEQ ID NO: 1604 - protein, 15 aa, synthetic construct
PGPHEPLGPRRGGRR

SEQ ID NO: 1605 - protein, 15 aa, synthetic construct
PGPPGSEGAAGGSGS

SEQ ID NO: 1606 - protein, 15 aa, synthetic construct
PGPPQPLSAAYLPHC

SEQ ID NO: 1607 - protein, 15 aa, synthetic construct
PGPRAAAAGRAGAAG

SEQ ID NO: 1608 - protein, 15 aa, synthetic construct
PGQGPGPGRCPRSLR

SEQ ID NO: 1609 - protein, 15 aa, synthetic construct
PGRGRGAAGGGGGEA

SEQ ID NO: 1610 - protein, 15 aa, synthetic construct
PGRRLEPSAPPGMNP

SEQ ID NO: 1611 - protein, 15 aa, synthetic construct
PGSLRLLQQPPSPAG

SEQ ID NO: 1612 - protein, 15 aa, synthetic construct
PGSSAAVGPRPGLES

SEQ ID NO: 1613 - protein, 15 aa, synthetic construct
PGTTARPPAARSSAP

SEQ ID NO: 1614 - protein, 15 aa, synthetic construct
PGVPGFPAGAGQRGL

SEQ ID NO: 1615 - protein, 15 aa, synthetic construct
PGWHHLRVRGQHREP

SEQ ID NO: 1616 - protein, 15 aa, synthetic construct
PHRQQEAGRGLLCQG

SEQ ID NO: 1617 - protein, 15 aa, synthetic construct
PIFGQRGQHADPDQG

SEQ ID NO: 1618 - protein, 15 aa, synthetic construct
PIGGRAALQQSLRAT

SEQ ID NO: 1619 - protein, 15 aa, synthetic construct
PLAPGLGSCWCPGRP

SEQ ID NO: 1620 - protein, 15 aa, synthetic construct
PLEAPARPSAVWPWR

SEQ ID NO: 1621 - protein, 15 aa, synthetic construct
PLPRLHCGQRPPAGT

SEQ ID NO: 1622 - protein, 15 aa, synthetic construct
PLQPGGCQAGLHQWV

SEQ ID NO: 1623 - protein, 15 aa, synthetic construct
PLRGHLPPPALQRAH

SEQ ID NO: 1624 - protein, 15 aa, synthetic construct
PLSVPGSRTQAGLPR

SEQ ID NO: 1625 - protein, 15 aa, synthetic construct
PLTPPGYRRRAEPGA

SEQ ID NO: 1626 - protein, 15 aa, synthetic construct
PMGKQSMPPKTTSAA

SEQ ID NO: 1627 - protein, 15 aa, synthetic construct
PPAARAALSPGPVAH

SEQ ID NO: 1628 - protein, 15 aa, synthetic construct
PPGALGRPPGVHGRQ

SEQ ID NO: 1629 - protein, 15 aa, synthetic construct
PPGGQRGGEPRRGGR

SEQ ID NO: 1630 - protein, 15 aa, synthetic construct
PPGLAAAREQGAEDR

SEQ ID NO: 1631 - protein, 15 aa, synthetic construct
PPGQPPAAGRAPPWA

SEQ ID NO: 1632 - protein, 15 aa, synthetic construct
PPKAASAAATAVPAA

SEQ ID NO: 1633 - protein, 15 aa, synthetic construct
PPLAGWCSATACSSR

SEQ ID NO: 1634 - protein, 15 aa, synthetic construct
PPPGASRLGHPPGWA

SEQ ID NO: 1635 - protein, 15 aa, synthetic construct
PPPSTPSSSGVGCRC

SEQ ID NO: 1636 - protein, 15 aa, synthetic construct
PPSCTPSRPAACSRA

SEQ ID NO: 1637 - protein, 15 aa, synthetic construct
PPSHALSRDLRRPHP

SEQ ID NO: 1638 - protein, 15 aa, synthetic construct
PPSMSAAGPSRCPRV

SEQ ID NO: 1639 - protein, 15 aa, synthetic construct
PQLGGAAAGPGRRGV

SEQ ID NO: 1640 - protein, 15 aa, synthetic construct
PQLHAARPAPPGPPG

SEQ ID NO: 1641 - protein, 15 aa, synthetic construct
PQPGGRPRSWWCPRG

SEQ ID NO: 1642 - protein, 15 aa, synthetic construct
PQQLLGQPDRAQLPG

SEQ ID NO: 1643 - protein, 15 aa, synthetic construct
PQSPRNAGTPGPLLR

SEQ ID NO: 1644 - protein, 15 aa, synthetic construct
PRAQDAPHGAAAGGR

SEQ ID NO: 1645 - protein, 15 aa, synthetic construct
PRCDTPPTPSGSHPR

SEQ ID NO: 1646 - protein, 15 aa, synthetic construct
PRFDPPQWWRPPKSR

SEQ ID NO: 1647 - protein, 15 aa, synthetic construct
PRGHCQPESPDSSSP

SEQ ID NO: 1648 - protein, 15 aa, synthetic construct
PRGPAAVPQRGLQED

SEQ ID NO: 1649 - protein, 15 aa, synthetic construct
PRGPHGPGRAAPGDR

SEQ ID NO: 1650 - protein, 15 aa, synthetic construct
PRLRPDAGPAPGLAA

SEQ ID NO: 1651 - protein, 15 aa, synthetic construct
PRPPCSAFAPPCCPS

SEQ ID NO: 1652 - protein, 15 aa, synthetic construct
PRPPPPGSTTTSSPT

SEQ ID NO: 1653 - protein, 15 aa, synthetic construct
PRQVRPADQEERHHR

SEQ ID NO: 1654 - protein, 15 aa, synthetic construct
PRRAEEGAATGRPPR

SEQ ID NO: 1655 - protein, 15 aa, synthetic construct
PRSATTGNVLTPTPW

SEQ ID NO: 1656 - protein, 15 aa, synthetic construct
PSASSALWPTPSCWY

SEQ ID NO: 1657 - protein, 15 aa, synthetic construct
PSATARCCATTSRVS

SEQ ID NO: 1658 - protein, 15 aa, synthetic construct
PSCRGFGGCGTSNSQ

SEQ ID NO: 1659 - protein, 15 aa, synthetic construct
PSCSWGRCASQDPGR

SEQ ID NO: 1660 - protein, 15 aa, synthetic construct
PSGLRSVGFPASGGA

SEQ ID NO: 1661 - protein, 15 aa, synthetic construct
PSMSSPRAAAWTCSA

SEQ ID NO: 1662 - protein, 15 aa, synthetic construct
PSPGGGPSLSSSANA

SEQ ID NO: 1663 - protein, 15 aa, synthetic construct
PSPPAPWPSATPRSY

SEQ ID NO: 1664 - protein, 15 aa, synthetic construct
PSPWTPPPSKSPPSA

SEQ ID NO: 1665 - protein, 15 aa, synthetic construct
PSRAAAEAVRCRWKP

SEQ ID NO: 1666 - protein, 15 aa, synthetic construct
PSSCSSALWLPAPPD

SEQ ID NO: 1667 - protein, 15 aa, synthetic construct
PSYATRDMSRPAGSR

SEQ ID NO: 1668 - protein, 15 aa, synthetic construct
PTALWCWRPAARPGS

SEQ ID NO: 1669 - protein, 15 aa, synthetic construct
PTDVPCRVPLPTSAI

SEQ ID NO: 1670 - protein, 15 aa, synthetic construct
PTQPAALCAGPLFGQ

SEQ ID NO: 1671 - protein, 15 aa, synthetic construct
PTRTLEPRNPDCWRA

SEQ ID NO: 1672 - protein, 15 aa, synthetic construct
PTSRTCSATGPCTPT

SEQ ID NO: 1673 - protein, 15 aa, synthetic construct
PVSLCYHHCGKPPYH

SEQ ID NO: 1674 - protein, 15 aa, synthetic construct
PWAWASLRGQGCPRA

SEQ ID NO: 1675 - protein, 15 aa, synthetic construct
PWESRGPRSCSSRSS

SEQ ID NO: 1676 - protein, 15 aa, synthetic construct
PWGSLPSGPLAEAAG

SEQ ID NO: 1677 - protein, 15 aa, synthetic construct
QAAGALERRPRAEGG

SEQ ID NO: 1678 - protein, 15 aa, synthetic construct
QAAGPVAGERPHHRR

SEQ ID NO: 1679 - protein, 15 aa, synthetic construct
QALLHVARLPVQEVQ

SEQ ID NO: 1680 - protein, 15 aa, synthetic construct
QAPCSSSISSSNSNS

SEQ ID NO: 1681 - protein, 15 aa, synthetic construct
QAREWDGKRLGRAGG

SEQ ID NO: 1682 - protein, 15 aa, synthetic construct
QASTGASPVPGRQGL

SEQ ID NO: 1683 - protein, 15 aa, synthetic construct
QEEGGGGRGRRTGRP

SEQ ID NO: 1684 - protein, 15 aa, synthetic construct
QGAAGDPPRAAGGAA

SEQ ID NO: 1685 - protein, 15 aa, synthetic construct
QGAHERPQERPHAGA

SEQ ID NO: 1686 - protein, 15 aa, synthetic construct
QGDRQMPVSGKDLCE

SEQ ID NO: 1687 - protein, 15 aa, synthetic construct
QGLPVPLPGDHRQPG

SEQ ID NO: 1688 - protein, 15 aa, synthetic construct
QGPARPAAVARGSRS

SEQ ID NO: 1689 - protein, 15 aa, synthetic construct
QGSPPGPGGGGRTWP

SEQ ID NO: 1690 - protein, 15 aa, synthetic construct
QHLHADRHEQRALRC

SEQ ID NO: 1691 - protein, 15 aa, synthetic construct
QHPREPQLRVGQPPA

SEQ ID NO: 1692 - protein, 15 aa, synthetic construct
QHRQGLGFGAPGTGR

SEQ ID NO: 1693 - protein, 15 aa, synthetic construct
QHRQGPRAATPGAGR

SEQ ID NO: 1694 - protein, 15 aa, synthetic construct
QHYPPAADLRQMRSE

SEQ ID NO: 1695 - protein, 15 aa, synthetic construct
QLHGPERAGPGLLRG

SEQ ID NO: 1696 - protein, 15 aa, synthetic construct
QLPQHLPLREAIQPQ

SEQ ID NO: 1697 - protein, 15 aa, synthetic construct
QLPRAHQGPGRPAAG

SEQ ID NO: 1698 - protein, 15 aa, synthetic construct
QMWSGGQLGPGLPRR

SEQ ID NO: 1699 - protein, 15 aa, synthetic construct
QPAAARGGDAAARCP

SEQ ID NO: 1700 - protein, 15 aa, synthetic construct
QPAAHAPLRHGRAAV

SEQ ID NO: 1701 - protein, 15 aa, synthetic construct
QPGAGRPAVPAQHPL

SEQ ID NO: 1702 - protein, 15 aa, synthetic construct
QPGAVRPAHPAAGHA

SEQ ID NO: 1703 - protein, 15 aa, synthetic construct
QPGPGQTAHERLHGV

SEQ ID NO: 1704 - protein, 15 aa, synthetic construct
QPHLQLAGLHERVAL

SEQ ID NO: 1705 - protein, 15 aa, synthetic construct
QPLAVGSPALPALRR

SEQ ID NO: 1706 - protein, 15 aa, synthetic construct
QPLCPGCQGQRPARC

SEQ ID NO: 1707 - protein, 15 aa, synthetic construct
QPQADPRARPRPGEE

SEQ ID NO: 1708 - protein, 15 aa, synthetic construct
QPQPTPCGAGLPTGP

SEQ ID NO: 1709 - protein, 15 aa, synthetic construct
QQAAAGATAAAARVP

SEQ ID NO: 1710 - protein, 15 aa, synthetic construct
QREPREHVRRAGGAH

SEQ ID NO: 1711 - protein, 15 aa, synthetic construct
QRGKACAELQSPSRR

SEQ ID NO: 1712 - protein, 15 aa, synthetic construct
QRLHRLHGRRAHPGA

SEQ ID NO: 1713 - protein, 15 aa, synthetic construct
QRLQSNSSPSSEFSC

SEQ ID NO: 1714 - protein, 15 aa, synthetic construct
QRPGAAGSAALPGGG

SEQ ID NO: 1715 - protein, 15 aa, synthetic construct
QRPGGRPPGAAAAPG

SEQ ID NO: 1716 - protein, 15 aa, synthetic construct
QRPGLHERRGVRADG

SEQ ID NO: 1717 - protein, 15 aa, synthetic construct
QVGGLPGAAAGRVHR

SEQ ID NO: 1718 - protein, 15 aa, synthetic construct
QVPVVTARLRPPAQE

SEQ ID NO: 1719 - protein, 15 aa, synthetic construct
QWAGCPWPSNPCPRH

SEQ ID NO: 1720 - protein, 15 aa, synthetic construct
RAAGGGADPAVGERA

SEQ ID NO: 1721 - protein, 15 aa, synthetic construct
RAEQAGQGARHHEQY

SEQ ID NO: 1722 - protein, 15 aa, synthetic construct
RAPPPGGAGAAGAAV

SEQ ID NO: 1723 - protein, 15 aa, synthetic construct
RAPTLRPPGVPSPSG

SEQ ID NO: 1724 - protein, 15 aa, synthetic construct
RCESAKRQLDHGRQD

SEQ ID NO: 1725 - protein, 15 aa, synthetic construct
RCGGAVRGCGALPAV

SEQ ID NO: 1726 - protein, 15 aa, synthetic construct
RCSSGGSGSSSSSGD

SEQ ID NO: 1727 - protein, 15 aa, synthetic construct
RDGGARGGPGPGIDA

SEQ ID NO: 1728 - protein, 15 aa, synthetic construct
RDPEVLPRHQVLPQP

SEQ ID NO: 1729 - protein, 15 aa, synthetic construct
RDPGPAGLGTARREL

SEQ ID NO: 1730 - protein, 15 aa, synthetic construct
RDPGQSAQVRGLLQP

SEQ ID NO: 1731 - protein, 15 aa, synthetic construct
REAQGGQQVHLLHGA

SEQ ID NO: 1732 - protein, 15 aa, synthetic construct
RETQRGCCPSYRDPV

SEQ ID NO: 1733 - protein, 15 aa, synthetic construct
REVPGRDAGARAADA

SEQ ID NO: 1734 - protein, 15 aa, synthetic construct
RGAGAGGGGRRLQPA

SEQ ID NO: 1735 - protein, 15 aa, synthetic construct
RGETQTAGPAATVAA

SEQ ID NO: 1736 - protein, 15 aa, synthetic construct
RGGPGAGALPEARAE

SEQ ID NO: 1737 - protein, 15 aa, synthetic construct
RGHEAGELQQVVWDE

SEQ ID NO: 1738 - protein, 15 aa, synthetic construct
RGHPPGRSVIEPSVW

SEQ ID NO: 1739 - protein, 15 aa, synthetic construct
RGKARVSHGWCQEEG

SEQ ID NO: 1740 - protein, 15 aa, synthetic construct
RGLQHDPRRHALQHH

SEQ ID NO: 1741 - protein, 15 aa, synthetic construct
RHLLLSDQGHPCRLQ

SEQ ID NO: 1742 - protein, 15 aa, synthetic construct
RHQPLGTAAPRGQPP

SEQ ID NO: 1743 - protein, 15 aa, synthetic construct
RKACTRSPNPLSPSM

SEQ ID NO: 1744 - protein, 15 aa, synthetic construct
RKKTWTRTPILPRTP

SEQ ID NO: 1745 - protein, 15 aa, synthetic construct
RKRAPRTPRRGRPSA

SEQ ID NO: 1746 - protein, 15 aa, synthetic construct
RKTLPLPAGPGRRRP

SEQ ID NO: 1747 - protein, 15 aa, synthetic construct
RKVSRRASEFPTAGC

SEQ ID NO: 1748 - protein, 15 aa, synthetic construct
RLGALEAAAHRGRGL

SEQ ID NO: 1749 - protein, 15 aa, synthetic construct
RLLWTQGDPPFCLPC

SEQ ID NO: 1750 - protein, 15 aa, synthetic construct
RLSAVSSTSTPSPSC

SEQ ID NO: 1751 - protein, 15 aa, synthetic construct
RPASAAPSAGCGASG

SEQ ID NO: 1752 - protein, 15 aa, synthetic construct
RPDVSPASCPESGAG

SEQ ID NO: 1753 - protein, 15 aa, synthetic construct
RPGAQELLGEPPPGP

SEQ ID NO: 1754 - protein, 15 aa, synthetic construct
RPLPPLPGTAATEPA

SEQ ID NO: 1755 - protein, 15 aa, synthetic construct
RPSNACATGSGWRRC

SEQ ID NO: 1756 - protein, 15 aa, synthetic construct
RPTPPGLPTSPWGAS

SEQ ID NO: 1757 - protein, 15 aa, synthetic construct
RQDPAQQPRAQHAPS

SEQ ID NO: 1758 - protein, 15 aa, synthetic construct
RQRENRSTGDSAAGL

SEQ ID NO: 1759 - protein, 15 aa, synthetic construct
RQRHPRPRRVPGARP

SEQ ID NO: 1760 - protein, 15 aa, synthetic construct
RQRLPDSAPGLQPRL

SEQ ID NO: 1761 - protein, 15 aa, synthetic construct
RRAAHPAHVAGAAAQ

SEQ ID NO: 1762 - protein, 15 aa, synthetic construct
RREPPGGGGCGGPPR

SEQ ID NO: 1763 - protein, 15 aa, synthetic construct
RRESPANMSTSAATW

SEQ ID NO: 1764 - protein, 15 aa, synthetic construct
RRHPPPDHDHHRPEL

SEQ ID NO: 1765 - protein, 15 aa, synthetic construct
RRPAGGGGAGGSRGG

SEQ ID NO: 1766 - protein, 15 aa, synthetic construct
RRPGGAGGAGEEARR

SEQ ID NO: 1767 - protein, 15 aa, synthetic construct
RRPHGVAAPPAVAHA

SEQ ID NO: 1768 - protein, 15 aa, synthetic construct
RRRLPLNPWKWPTST

SEQ ID NO: 1769 - protein, 15 aa, synthetic construct
RSAESASSPEGRHSF

SEQ ID NO: 1770 - protein, 15 aa, synthetic construct
RSAPASALPIPRLSP

SEQ ID NO: 1771 - protein, 15 aa, synthetic construct
RSAPQSPAASHSSRG

SEQ ID NO: 1772 - protein, 15 aa, synthetic construct
RSQALPTSAPGTPPP

SEQ ID NO: 1773 - protein, 15 aa, synthetic construct
RSRGAGLGAGGAHAV

SEQ ID NO: 1774 - protein, 15 aa, synthetic construct
RSSETFPVAAAGSCQ

SEQ ID NO: 1775 - protein, 15 aa, synthetic construct
RSSTPGSMTTCVGCG

SEQ ID NO: 1776 - protein, 15 aa, synthetic construct
RSWRPGTSPASVPPP

SEQ ID NO: 1777 - protein, 15 aa, synthetic construct
RTGVVSGLEHREHRP

SEQ ID NO: 1778 - protein, 15 aa, synthetic construct
RTRQPEQHPSPRGPP

SEQ ID NO: 1779 - protein, 15 aa, synthetic construct
RTWSSCPWPPSASRW

SEQ ID NO: 1780 - protein, 15 aa, synthetic construct
RWWCSRAAAETSCTG

SEQ ID NO: 1781 - protein, 15 aa, synthetic construct
SAAALGRPGARGGRA

SEQ ID NO: 1782 - protein, 15 aa, synthetic construct
SAAPPGGPGKPRSRD

SEQ ID NO: 1783 - protein, 15 aa, synthetic construct
SAAPSLRGGLPRRRR

SEQ ID NO: 1784 - protein, 15 aa, synthetic construct
SAASLARCQAAWEPS

SEQ ID NO: 1785 - protein, 15 aa, synthetic construct
SAERAGPRVAHQMCS

SEQ ID NO: 1786 - protein, 15 aa, synthetic construct
SAGGVGLGADALLLR

SEQ ID NO: 1787 - protein, 15 aa, synthetic construct
SAGQRQPDPRQAPER

SEQ ID NO: 1788 - protein, 15 aa, synthetic construct
SALASSSLPGTLRQP

SEQ ID NO: 1789 - protein, 15 aa, synthetic construct
SAPAARSPTRTRRLP

SEQ ID NO: 1790 - protein, 15 aa, synthetic construct
SAPDGPRVGPAVALG

SEQ ID NO: 1791 - protein, 15 aa, synthetic construct
SAPFSRAAGTPPQTQ

SEQ ID NO: 1792 - protein, 15 aa, synthetic construct
SAPGRHGAAAPPRTG

SEQ ID NO: 1793 - protein, 15 aa, synthetic construct
SAPPPLRPQPRPLPQ

SEQ ID NO: 1794 - protein, 15 aa, synthetic construct
SAPQGSIASFSRSDH

SEQ ID NO: 1795 - protein, 15 aa, synthetic construct
SAPSAPSSRLPAPAA

SEQ ID NO: 1796 - protein, 15 aa, synthetic construct
SAPSRAQAGVPAPVW

SEQ ID NO: 1797 - protein, 15 aa, synthetic construct
SASRPVHTCSWAPFS

SEQ ID NO: 1798 - protein, 15 aa, synthetic construct
SATAAAVANVAGRGA

SEQ ID NO: 1799 - protein, 15 aa, synthetic construct
SCPAVPVHSTTGPCA

SEQ ID NO: 1800 - protein, 15 aa, synthetic construct
SCPCTWSRCWEMCSS

SEQ ID NO: 1801 - protein, 15 aa, synthetic construct
SCPFSAPCWGGRAVI

SEQ ID NO: 1802 - protein, 15 aa, synthetic construct
SCSCTVFCPRTSNPW

SEQ ID NO: 1803 - protein, 15 aa, synthetic construct
SCSRARPTSASAPWA

SEQ ID NO: 1804 - protein, 15 aa, synthetic construct
SCSTWATSRISCAFS

SEQ ID NO: 1805 - protein, 15 aa, synthetic construct
SCTSATPRAPVRTLG

SEQ ID NO: 1806 - protein, 15 aa, synthetic construct
SDPRTPAWALLQATG

SEQ ID NO: 1807 - protein, 15 aa, synthetic construct
SGGAVGGRLRRADQV

SEQ ID NO: 1808 - protein, 15 aa, synthetic construct
SGGAVGRRAGPAGGR

SEQ ID NO: 1809 - protein, 15 aa, synthetic construct
SGHTNGWRSASSGSR

SEQ ID NO: 1810 - protein, 15 aa, synthetic construct
SGLAAPGPATPAPGT

SEQ ID NO: 1811 - protein, 15 aa, synthetic construct
SGLRAGAAAPSCARG

SEQ ID NO: 1812 - protein, 15 aa, synthetic construct
SGPEGSAPAGLPWAP

SEQ ID NO: 1813 - protein, 15 aa, synthetic construct
SGPRGGQAVRCPSAR

SEQ ID NO: 1814 - protein, 15 aa, synthetic construct
SGPSLSAFKSQGDPR

SEQ ID NO: 1815 - protein, 15 aa, synthetic construct
SGQGSGPGNWGTGLP

SEQ ID NO: 1816 - protein, 15 aa, synthetic construct
SGQQRLFRPAAGGGA

SEQ ID NO: 1817 - protein, 15 aa, synthetic construct
SGQRPAAQRPHVGGK

SEQ ID NO: 1818 - protein, 15 aa, synthetic construct
SGRALGAPRPPGRCP

SEQ ID NO: 1819 - protein, 15 aa, synthetic construct
SGRPLTAPRPAQAAA

SEQ ID NO: 1820 - protein, 15 aa, synthetic construct
SGRSACTPASSTGAA

SEQ ID NO: 1821 - protein, 15 aa, synthetic construct
SGTAGPGAPARPVTA

SEQ ID NO: 1822 - protein, 15 aa, synthetic construct
SGVGASGGSGSMRPA

SEQ ID NO: 1823 - protein, 15 aa, synthetic construct
SHSCTQSIFLATWPS

SEQ ID NO: 1824 - protein, 15 aa, synthetic construct
SLAAHSPNYGAAGAV

SEQ ID NO: 1825 - protein, 15 aa, synthetic construct
SLAQRHRDAQALRRS

SEQ ID NO: 1826 - protein, 15 aa, synthetic construct
SLASMTSLNCISCFL

SEQ ID NO: 1827 - protein, 15 aa, synthetic construct
SLCWVVSCSSKLLAI

SEQ ID NO: 1828 - protein, 15 aa, synthetic construct
SLDRGAGRAHGAAHR

SEQ ID NO: 1829 - protein, 15 aa, synthetic construct
SLFCSLKGPQQGRLQ

SEQ ID NO: 1830 - protein, 15 aa, synthetic construct
SLGGCCCCCCPRSAA

SEQ ID NO: 1831 - protein, 15 aa, synthetic construct
SLLCGGRGPARAPQL

SEQ ID NO: 1832 - protein, 15 aa, synthetic construct
SLSAEARDPRPTGRT

SEQ ID NO: 1833 - protein, 15 aa, synthetic construct
SLWKYYTSPGKCTEI

SEQ ID NO: 1834 - protein, 15 aa, synthetic construct
SNCGMWHCWPCPECC

SEQ ID NO: 1835 - protein, 15 aa, synthetic construct
SPASRTPWAWATCGD

SEQ ID NO: 1836 - protein, 15 aa, synthetic construct
SPCLQNPCPALPAWA

SEQ ID NO: 1837 - protein, 15 aa, synthetic construct
SPCSAASSTGPSRGM

SEQ ID NO: 1838 - protein, 15 aa, synthetic construct
SPFADLGRKPHHGHR

SEQ ID NO: 1839 - protein, 15 aa, synthetic construct
SPGRPRRQGPSARSP

SEQ ID NO: 1840 - protein, 15 aa, synthetic construct
SPNSGPGRQQRHPPE

SEQ ID NO: 1841 - protein, 15 aa, synthetic construct
SPPPSTPPSSSPAPP

SEQ ID NO: 1842 - protein, 15 aa, synthetic construct
SPRRAAHSPDLLLPH

SEQ ID NO: 1843 - protein, 15 aa, synthetic construct
SQTFCTPAWGIWGRP

SEQ ID NO: 1844 - protein, 15 aa, synthetic construct
SRDPRPRICAVLDWD

SEQ ID NO: 1845 - protein, 15 aa, synthetic construct
SSAPRSMATPSPSTK

SEQ ID NO: 1846 - protein, 15 aa, synthetic construct
SSGCSCSHVKPWATT

SEQ ID NO: 1847 - protein, 15 aa, synthetic construct
SSGGPRRHGREAERQ

SEQ ID NO: 1848 - protein, 15 aa, synthetic construct
SSGRGGRSSCGGHTL

SEQ ID NO: 1849 - protein, 15 aa, synthetic construct
SSGSTSCAAASTWTR

SEQ ID NO: 1850 - protein, 15 aa, synthetic construct
SSMGQSIATGKGLGA

SEQ ID NO: 1851 - protein, 15 aa, synthetic construct
SSNSSNSSSSSSNSG

SEQ ID NO: 1852 - protein, 15 aa, synthetic construct
SSPCTWLPSSETCSS

SEQ ID NO: 1853 - protein, 15 aa, synthetic construct
SSPCWPSRNSGQARR

SEQ ID NO: 1854 - protein, 15 aa, synthetic construct
SSPMQAASPRCAFLY

SEQ ID NO: 1855 - protein, 15 aa, synthetic construct
SSPRCPSGKRLEMRR

SEQ ID NO: 1856 - protein, 15 aa, synthetic construct
SSPRGCRSYAGIARC

SEQ ID NO: 1857 - protein, 15 aa, synthetic construct
SSPTTTGARTARSRP

SEQ ID NO: 1858 - protein, 15 aa, synthetic construct
SSSRISCSPVSPTST

SEQ ID NO: 1859 - protein, 15 aa, synthetic construct
SSWASCWPRGSSCPG

SEQ ID NO: 1860 - protein, 15 aa, synthetic construct
STAGLRSTSCASPPT

SEQ ID NO: 1861 - protein, 15 aa, synthetic construct
STAMPGAWRSCCWTP

SEQ ID NO: 1862 - protein, 15 aa, synthetic construct
STARDPAITCISANS

SEQ ID NO: 1863 - protein, 15 aa, synthetic construct
STGCGSGSRCGSSLI

SEQ ID NO: 1864 - protein, 15 aa, synthetic construct
STRAAGGSSWTWSEM

SEQ ID NO: 1865 - protein, 15 aa, synthetic construct
STSSATSPSPCSWTC

SEQ ID NO: 1866 - protein, 15 aa, synthetic construct
SVFCGGGNRERHLSY

SEQ ID NO: 1867 - protein, 15 aa, synthetic construct
SVSPSATASAWSLRV

SEQ ID NO: 1868 - protein, 15 aa, synthetic construct
SWPSALIPTCTPPCT

SEQ ID NO: 1869 - protein, 15 aa, synthetic construct
TAARVGHPSPCGVGA

SEQ ID NO: 1870 - protein, 15 aa, synthetic construct
TAHRGGRISPQEGLP

SEQ ID NO: 1871 - protein, 15 aa, synthetic construct
TAPAHGAQLPSPQRG

SEQ ID NO: 1872 - protein, 15 aa, synthetic construct
TAPARPRGFSAAAAT

SEQ ID NO: 1873 - protein, 15 aa, synthetic construct
TASASAPGWRPAAPG

SEQ ID NO: 1874 - protein, 15 aa, synthetic construct
TAVLARVPSRGPGAA

SEQ ID NO: 1875 - protein, 15 aa, synthetic construct
TCSCATASNTRTCGC

SEQ ID NO: 1876 - protein, 15 aa, synthetic construct
TGCTRSTCLPRTSVV

SEQ ID NO: 1877 - protein, 15 aa, synthetic construct
TGRSSAWHANSASST

SEQ ID NO: 1878 - protein, 15 aa, synthetic construct
THCTQRHAGGRAGAP

SEQ ID NO: 1879 - protein, 15 aa, synthetic construct
TITRNNNSSSNSRSS

SEQ ID NO: 1880 - protein, 15 aa, synthetic construct
TLPGARQGQALLPHG

SEQ ID NO: 1881 - protein, 15 aa, synthetic construct
TLQAAPAAASPLCVL

SEQ ID NO: 1882 - protein, 15 aa, synthetic construct
TLSLPRSTLTGSCGW

SEQ ID NO: 1883 - protein, 15 aa, synthetic construct
TPAAARVQVPVREGA

SEQ ID NO: 1884 - protein, 15 aa, synthetic construct
TPCTAAHLFGSCGSR

SEQ ID NO: 1885 - protein, 15 aa, synthetic construct
TPGHEPAGRRSAGLC

SEQ ID NO: 1886 - protein, 15 aa, synthetic construct
TPQPRSAPEKGQGGG

SEQ ID NO: 1887 - protein, 15 aa, synthetic construct
TPVLHHCRDRPEPPG

SEQ ID NO: 1888 - protein, 15 aa, synthetic construct
TRPACAACPPQGCAA

SEQ ID NO: 1889 - protein, 15 aa, synthetic construct
TSTNSTPAAARWATS

SEQ ID NO: 1890 - protein, 15 aa, synthetic construct
TTSPATSGWSSSAAS

SEQ ID NO: 1891 - protein, 15 aa, synthetic construct
TTSSRIITGPSFLSG

SEQ ID NO: 1892 - protein, 15 aa, synthetic construct
VARHAQRRDLQAPGP

SEQ ID NO: 1893 - protein, 15 aa, synthetic construct
VAVAWPGGPSPRCGA

SEQ ID NO: 1894 - protein, 15 aa, synthetic construct
VDAAVVWLYAGASGV

SEQ ID NO: 1895 - protein, 15 aa, synthetic construct
VFGPQAPDARVQRGL

SEQ ID NO: 1896 - protein, 15 aa, synthetic construct
VFTDPRAPEIPVPSV

SEQ ID NO: 1897 - protein, 15 aa, synthetic construct
VGEPGGGVAGQRAVD

SEQ ID NO: 1898 - protein, 15 aa, synthetic construct
VGGAAATATRPGRLC

SEQ ID NO: 1899 - protein, 15 aa, synthetic construct
VGGGDGRGSEAGERR

SEQ ID NO: 1900 - protein, 15 aa, synthetic construct
VGGPVDVLRGAEHGP

SEQ ID NO: 1901 - protein, 15 aa, synthetic construct
VGPAGRRTPGAAALP

SEQ ID NO: 1902 - protein, 15 aa, synthetic construct
VGPKRSHEATAHSVY

SEQ ID NO: 1903 - protein, 15 aa, synthetic construct
VGPPGPGPRRGPAAP

SEQ ID NO: 1904 - protein, 15 aa, synthetic construct
VGRPEVSPAAVCPRL

SEQ ID NO: 1905 - protein, 15 aa, synthetic construct
VLPFGDPVGGQGRAD

SEQ ID NO: 1906 - protein, 15 aa, synthetic construct
VLPQAAQTHLQVLPP

SEQ ID NO: 1907 - protein, 15 aa, synthetic construct
VLWEVCTMHRTFSGG

SEQ ID NO: 1908 - protein, 15 aa, synthetic construct
VPAWGRGQHCPHVPF

SEQ ID NO: 1909 - protein, 15 aa, synthetic construct
VPCEAAPARRARHLG

SEQ ID NO: 1910 - protein, 15 aa, synthetic construct
VPGGRAPPGVGHGGP

SEQ ID NO: 1911 - protein, 15 aa, synthetic construct
VPGQAARGPRARHAG

SEQ ID NO: 1912 - protein, 15 aa, synthetic construct
VPGRADQHPVHRARL

SEQ ID NO: 1913 - protein, 15 aa, synthetic construct
VPGWAAPARAGPRAQ

SEQ ID NO: 1914 - protein, 15 aa, synthetic construct
VPGWVHTPQGGGART

SEQ ID NO: 1915 - protein, 15 aa, synthetic construct
VPLPGRSAVAVPGRA

SEQ ID NO: 1916 - protein, 15 aa, synthetic construct
VPRAAAQDGPGEPQD

SEQ ID NO: 1917 - protein, 15 aa, synthetic construct
VQAAPVGPRGGLPLW

SEQ ID NO: 1918 - protein, 15 aa, synthetic construct
VQSREVRGERHSAFA

SEQ ID NO: 1919 - protein, 15 aa, synthetic construct
VRAPGDAVRNRIRSD

SEQ ID NO: 1920 - protein, 15 aa, synthetic construct
VRDHPTEQRLWVQTP

SEQ ID NO: 1921 - protein, 15 aa, synthetic construct
VRGAQPEFQPEPRLP

SEQ ID NO: 1922 - protein, 15 aa, synthetic construct
VRGQQLQPDPKPGHP

SEQ ID NO: 1923 - protein, 15 aa, synthetic construct
VRPGATGATASIGAQ

SEQ ID NO: 1924 - protein, 15 aa, synthetic construct
VRPPPRLQLAAGQAA

SEQ ID NO: 1925 - protein, 15 aa, synthetic construct
VRSRETGRQSASKGQ

SEQ ID NO: 1926 - protein, 15 aa, synthetic construct
VSAVLHHLPVWQPQG

SEQ ID NO: 1927 - protein, 15 aa, synthetic construct
VSLPMPGPEGLQRSL

SEQ ID NO: 1928 - protein, 15 aa, synthetic construct
VSPQARQTPALKQTG

SEQ ID NO: 1929 - protein, 15 aa, synthetic construct
VVLRPPAGGDLDPGC

SEQ ID NO: 1930 - protein, 15 aa, synthetic construct
VVPPSRAAAAPAQQQ

SEQ ID NO: 1931 - protein, 15 aa, synthetic construct
VWSMALPRQPDQGNG

SEQ ID NO: 1932 - protein, 15 aa, synthetic construct
VWSQQWIWLWGWSWR

SEQ ID NO: 1933 - protein, 15 aa, synthetic construct
VYGKMCPLCGALPHY

SEQ ID NO: 1934 - protein, 15 aa, synthetic construct
WAAAGDSCLASWAPC

SEQ ID NO: 1935 - protein, 15 aa, synthetic construct
WAASGSRDRGRDPRS

SEQ ID NO: 1936 - protein, 15 aa, synthetic construct
WAASVASSPATASTA

SEQ ID NO: 1937 - protein, 15 aa, synthetic construct
WAGCCGPPGCRRCFR

SEQ ID NO: 1938 - protein, 15 aa, synthetic construct
WAGGEPRPVGRWDGP

SEQ ID NO: 1939 - protein, 15 aa, synthetic construct
WAGRDGPAGRTAGPP

SEQ ID NO: 1940 - protein, 15 aa, synthetic construct
WAGSTSPTGAERGWL

SEQ ID NO: 1941 - protein, 15 aa, synthetic construct
WAGTTPTSPPCLTRM

SEQ ID NO: 1942 - protein, 15 aa, synthetic construct
WAHWPGRCCCLCWPS

SEQ ID NO: 1943 - protein, 15 aa, synthetic construct
WAIASATRSGCWSCC

SEQ ID NO: 1944 - protein, 15 aa, synthetic construct
WAISPRTWGWSPGSW

SEQ ID NO: 1945 - protein, 15 aa, synthetic construct
WAPRPAPCGWRSASC

SEQ ID NO: 1946 - protein, 15 aa, synthetic construct
WARAGCPRPSSCCCA

SEQ ID NO: 1947 - protein, 15 aa, synthetic construct
WASCPSFSSWPHSSQ

SEQ ID NO: 1948 - protein, 15 aa, synthetic construct
WASGAARGAAAGQPW

SEQ ID NO: 1949 - protein, 15 aa, synthetic construct
WCPIPCMACPFFRAR

SEQ ID NO: 1950 - protein, 15 aa, synthetic construct
WCSPAPPTAARTATT

SEQ ID NO: 1951 - protein, 15 aa, synthetic construct
WCSSGARGPSGTAGR

SEQ ID NO: 1952 - protein, 15 aa, synthetic construct
WERPTAACSTRSPAS

SEQ ID NO: 1953 - protein, 15 aa, synthetic construct
WEVEPVLRTKNWPRG

SEQ ID NO: 1954 - protein, 15 aa, synthetic construct
WGAARGCCCSGAARW

SEQ ID NO: 1955 - protein, 15 aa, synthetic construct
WGASSRSSSPRCWGC

SEQ ID NO: 1956 - protein, 15 aa, synthetic construct
WGCGGSQCSLQPEGW

SEQ ID NO: 1957 - protein, 15 aa, synthetic construct
WGHWGWRAGVGGSRG

SEQ ID NO: 1958 - protein, 15 aa, synthetic construct
WGLLACRGCMGFSRS

SEQ ID NO: 1959 - protein, 15 aa, synthetic construct
WGLRQPGAAWSGCWA

SEQ ID NO: 1960 - protein, 15 aa, synthetic construct
WGPAGRPPRPGLVTC

SEQ ID NO: 1961 - protein, 15 aa, synthetic construct
WGPAPLSSSCSFCHG

SEQ ID NO: 1962 - protein, 15 aa, synthetic construct
WGPCSGARPCAWRSS

SEQ ID NO: 1963 - protein, 15 aa, synthetic construct
WGPLRAAAPPSPPAA

SEQ ID NO: 1964 - protein, 15 aa, synthetic construct
WGRACCSRRCCCSCW

SEQ ID NO: 1965 - protein, 15 aa, synthetic construct
WGSPASSSQETAPVA

SEQ ID NO: 1966 - protein, 15 aa, synthetic construct
WGTASNPPPRMTSPC

SEQ ID NO: 1967 - protein, 15 aa, synthetic construct
WGTCCPRTWTTPGAS

SEQ ID NO: 1968 - protein, 15 aa, synthetic construct
WGTLPALKRNCTLSP

SEQ ID NO: 1969 - protein, 15 aa, synthetic construct
WGVGGGGGGADSRGA

SEQ ID NO: 1970 - protein, 15 aa, synthetic construct
WISASWRETIQAAVA

SEQ ID NO: 1971 - protein, 15 aa, synthetic construct
WKAPMALGSTPFSPT

SEQ ID NO: 1972 - protein, 15 aa, synthetic construct
WKEETKQKLETFSSW

SEQ ID NO: 1973 - protein, 15 aa, synthetic construct
WKLSPQETKLLLNLS

SEQ ID NO: 1974 - protein, 15 aa, synthetic construct
WKTNPAFLNFSSEEY

SEQ ID NO: 1975 - protein, 15 aa, synthetic construct
WLGRGQPRDSRVQED

SEQ ID NO: 1976 - protein, 15 aa, synthetic construct
WLLPISAASCACLPS

SEQ ID NO: 1977 - protein, 15 aa, synthetic construct
WLRAETAETRSPSPA

SEQ ID NO: 1978 - protein, 15 aa, synthetic construct
WLRPKGFPRPQARLR

SEQ ID NO: 1979 - protein, 15 aa, synthetic construct
WMEITRVRTHSSFSW

SEQ ID NO: 1980 - protein, 15 aa, synthetic construct
WMPPGPWPRPPPPVR

SEQ ID NO: 1981 - protein, 15 aa, synthetic construct
WPAPRSPPPPAIPGS

SEQ ID NO: 1982 - protein, 15 aa, synthetic construct
WPCCCCCSVPSAGVQ

SEQ ID NO: 1983 - protein, 15 aa, synthetic construct
WPCHHSSARVAQAHR

SEQ ID NO: 1984 - protein, 15 aa, synthetic construct
WPFPASPMRDGFSSW

SEQ ID NO: 1985 - protein, 15 aa, synthetic construct
WPGSSSSTMTVGTPS

SEQ ID NO: 1986 - protein, 15 aa, synthetic construct
WPKPCPGSCCGWARE

SEQ ID NO: 1987 - protein, 15 aa, synthetic construct
WPLAGLCSCCSWQPG

SEQ ID NO: 1988 - protein, 15 aa, synthetic construct
WPLKGIAQRNQRIAA

SEQ ID NO: 1989 - protein, 15 aa, synthetic construct
WPLPTVTYEYGRRPT

SEQ ID NO: 1990 - protein, 15 aa, synthetic construct
WPLSAPGLWGGPRSE

SEQ ID NO: 1991 - protein, 15 aa, synthetic construct
WPPPSPSTPPGRPPG

SEQ ID NO: 1992 - protein, 15 aa, synthetic construct
WPPSPAPASRKSTSS

SEQ ID NO: 1993 - protein, 15 aa, synthetic construct
WPQPAGRERPGTACS

SEQ ID NO: 1994 - protein, 15 aa, synthetic construct
WPQPSCCCCCCGHRV

SEQ ID NO: 1995 - protein, 15 aa, synthetic construct
WPQQEIPGAGSWGTS

SEQ ID NO: 1996 - protein, 15 aa, synthetic construct
WPRAAGAPGSACCSG

SEQ ID NO: 1997 - protein, 15 aa, synthetic construct
WPSGLPSGWALCSWF

SEQ ID NO: 1998 - protein, 15 aa, synthetic construct
WPSGVRETHAGSWRS

SEQ ID NO: 1999 - protein, 15 aa, synthetic construct
WPTPRSPPPPAIPGS

SEQ ID NO: 2000 - protein, 15 aa, synthetic construct
WPWLGPPAARACRPA

SEQ ID NO: 2001 - protein, 15 aa, synthetic construct
WQEKCPRPRAAFRWS

SEQ ID NO: 2002 - protein, 15 aa, synthetic construct
WQLPCSGLRCGDGEP

SEQ ID NO: 2003 - protein, 15 aa, synthetic construct
WQPRLGTWPEQRPHR

SEQ ID NO: 2004 - protein, 15 aa, synthetic construct
WQQLPKWLWWQGQQQ

SEQ ID NO: 2005 - protein, 15 aa, synthetic construct
WQQPPGPRTCLAPER

SEQ ID NO: 2006 - protein, 15 aa, synthetic construct
WQRNNNSRHHSSLMP

SEQ ID NO: 2007 - protein, 15 aa, synthetic construct
WQSVWGASGGGQRLE

SEQ ID NO: 2008 - protein, 15 aa, synthetic construct
WRAASAPISGAPAAG

SEQ ID NO: 2009 - protein, 15 aa, synthetic construct
WRAEGGPRCASSSSW

SEQ ID NO: 2010 - protein, 15 aa, synthetic construct
WRATGCHGAASPSRV

SEQ ID NO: 2011 - protein, 15 aa, synthetic construct
WRGSRTCLCFSCRFC

SEQ ID NO: 2012 - protein, 15 aa, synthetic construct
WRIGYSAGTAVGCCC

SEQ ID NO: 2013 - protein, 15 aa, synthetic construct
WRLCKSCHTAESWSC

SEQ ID NO: 2014 - protein, 15 aa, synthetic construct
WRNAEGRAVVPEAPG

SEQ ID NO: 2015 - protein, 15 aa, synthetic construct
WRQGRPSCMTRPFWA

SEQ ID NO: 2016 - protein, 15 aa, synthetic construct
WRRPAEGGTASARAC

SEQ ID NO: 2017 - protein, 15 aa, synthetic construct
WRRPGEAGMASPGGP

SEQ ID NO: 2018 - protein, 15 aa, synthetic construct
WRTEVSERSCSRRHR

SEQ ID NO: 2019 - protein, 15 aa, synthetic construct
WRVHLGAGAAESCCC

SEQ ID NO: 2020 - protein, 15 aa, synthetic construct
WSAPRPAPPAGTPVR

SEQ ID NO: 2021 - protein, 15 aa, synthetic construct
WSATAARGAGAAAAR

SEQ ID NO: 2022 - protein, 15 aa, synthetic construct
WSCAAGAWAARRWRG

SEQ ID NO: 2023 - protein, 15 aa, synthetic construct
WSDRRPWPCFPSRTP

SEQ ID NO: 2024 - protein, 15 aa, synthetic construct
WSGCGTCGSGCRRGS

SEQ ID NO: 2025 - protein, 15 aa, synthetic construct
WSGSPARNHPPPACP

SEQ ID NO: 2026 - protein, 15 aa, synthetic construct
WSHRWSRPEGSKSPE

SEQ ID NO: 2027 - protein, 15 aa, synthetic construct
WSQVQVTSTVTARGA

SEQ ID NO: 2028 - protein, 15 aa, synthetic construct
WSTPPCSSTLPSTAS

SEQ ID NO: 2029 - protein, 15 aa, synthetic construct
WSTSAGGGSARPARR

SEQ ID NO: 2030 - protein, 15 aa, synthetic construct
WSWTTGPAAGSTPTP

SEQ ID NO: 2031 - protein, 15 aa, synthetic construct
WTAPLPLSLNLELPS

SEQ ID NO: 2032 - protein, 15 aa, synthetic construct
WTHRPGPWAFAASSF

SEQ ID NO: 2033 - protein, 15 aa, synthetic construct
WTLISPHSAPGTISS

SEQ ID NO: 2034 - protein, 15 aa, synthetic construct
WTTATGPVCPILFSW

SEQ ID NO: 2035 - protein, 15 aa, synthetic construct
WWFSAAAWSCTTTPR

SEQ ID NO: 2036 - protein, 15 aa, synthetic construct
WWLCWAAGACCACGC

SEQ ID NO: 2037 - protein, 15 aa, synthetic construct
YCTSWWSDFTTRRAA

SEQ ID NO: 2038 - protein, 15 aa, synthetic construct
YHCTSSCPSSWLPCL

SEQ ID NO: 2039 - protein, 15 aa, synthetic construct
YLPARFRGASAAAVQ

SEQ ID NO: 2040 - protein, 15 aa, synthetic construct
YPARPGHAARGLHRV

SEQ ID NO: 2041 - protein, 15 aa, synthetic construct
AARRGRFSRAPRAAR

SEQ ID NO: 2042 - protein, 15 aa, synthetic construct
AARRRRSRPRRGCPG

SEQ ID NO: 2043 - protein, 15 aa, synthetic construct
AGARRPRVSTPAGAV

SEQ ID NO: 2044 - protein, 15 aa, synthetic construct
AGDQEATAAPAAAAG

SEQ ID NO: 2045 - protein, 15 aa, synthetic construct
AGVAATTASGPERGS

SEQ ID NO: 2046 - protein, 15 aa, synthetic construct
APWGPALRPGGPRPR

SEQ ID NO: 2047 - protein, 15 aa, synthetic construct
ARAPRTPPPAAGPAG

SEQ ID NO: 2048 - protein, 15 aa, synthetic construct
ARRFRASADPRKAAS

SEQ ID NO: 2049 - protein, 15 aa, synthetic construct
ASRRRRRSTATRSTA

SEQ ID NO: 2050 - protein, 15 aa, synthetic construct
ASWAPGPRISGRRAS

SEQ ID NO: 2051 - protein, 15 aa, synthetic construct
CCRRRRTAAAGGLGR

SEQ ID NO: 2052 - protein, 15 aa, synthetic construct
CCSRSCTTCTSTPSS

SEQ ID NO: 2053 - protein, 15 aa, synthetic construct
CICIRSSPELSTLET

SEQ ID NO: 2054 - protein, 15 aa, synthetic construct
CPGSSARRPRSSRPW

SEQ ID NO: 2055 - protein, 15 aa, synthetic construct
CRRRRASRRPRDSGQ

SEQ ID NO: 2056 - protein, 15 aa, synthetic construct
CRRRRTRAWSSRSRR

SEQ ID NO: 2057 - protein, 15 aa, synthetic construct
CSRRPRASRRPRRVR

SEQ ID NO: 2058 - protein, 15 aa, synthetic construct
CWGCCSAAPPGLPAS

SEQ ID NO: 2059 - protein, 15 aa, synthetic construct
EGQHVPTGPGVRPRF

SEQ ID NO: 2060 - protein, 15 aa, synthetic construct
ERVAGRRAGVSAGAP

SEQ ID NO: 2061 - protein, 15 aa, synthetic construct
GAGGRRRRVSRPLRH

SEQ ID NO: 2062 - protein, 15 aa, synthetic construct
GGALAGARVAEAAAV

SEQ ID NO: 2063 - protein, 15 aa, synthetic construct
GGGGGRRGAARGPGG

SEQ ID NO: 2064 - protein, 15 aa, synthetic construct
GLCHPAPADLSQQDP

SEQ ID NO: 2065 - protein, 15 aa, synthetic construct
GLSWKALSSASRWRT

SEQ ID NO: 2066 - protein, 15 aa, synthetic construct
GPPPPARLAVRRRGA

SEQ ID NO: 2067 - protein, 15 aa, synthetic construct
GPRRRPRASSAAGST

SEQ ID NO: 2068 - protein, 15 aa, synthetic construct
GSRARRADAQVRGGR

SEQ ID NO: 2069 - protein, 15 aa, synthetic construct
GSRRRGRGRRAALRP

SEQ ID NO: 2070 - protein, 15 aa, synthetic construct
GSRRRTETFRPTSGL

SEQ ID NO: 2071 - protein, 15 aa, synthetic construct
GTRRRPATRSGKWGW

SEQ ID NO: 2072 - protein, 15 aa, synthetic construct
GVAQLPRRGHSRRGQ

SEQ ID NO: 2073 - protein, 15 aa, synthetic construct
GVWQTPPRVESFASG

SEQ ID NO: 2074 - protein, 15 aa, synthetic construct
LESSQKMPFHLLKPL

SEQ ID NO: 2075 - protein, 15 aa, synthetic construct
LLRRARATRTGQASD

SEQ ID NO: 2076 - protein, 15 aa, synthetic construct
PARSVSWRRPRASPP

SEQ ID NO: 2077 - protein, 15 aa, synthetic construct
PGPGRRPRARELGRR

SEQ ID NO: 2078 - protein, 15 aa, synthetic construct
PPRRPRVSPAPRSRR

SEQ ID NO: 2079 - protein, 15 aa, synthetic construct
PSALARAELGGHGGA

SEQ ID NO: 2080 - protein, 15 aa, synthetic construct
PTGTTSGTQSWGTEK

SEQ ID NO: 2081 - protein, 15 aa, synthetic construct
QHRPRRARASHRSPA

SEQ ID NO: 2082 - protein, 15 aa, synthetic construct
RASGSGHPFSLGDRK

SEQ ID NO: 2083 - protein, 15 aa, synthetic construct
RRKARASRSPKRPTP

SEQ ID NO: 2084 - protein, 15 aa, synthetic construct
RRRAPSLVPAQRSRT

SEQ ID NO: 2085 - protein, 15 aa, synthetic construct
RRRPRGSRREAGSRA

SEQ ID NO: 2086 - protein, 15 aa, synthetic construct
RRRPRRPRATARPAR

SEQ ID NO: 2087 - protein, 15 aa, synthetic construct
RRRPRTPGSPPPPTP

SEQ ID NO: 2088 - protein, 15 aa, synthetic construct
RRRPSPPARCWRTSD

SEQ ID NO: 2089 - protein, 15 aa, synthetic construct
RRRRYAAQRAGRSNR

SEQ ID NO: 2090 - protein, 15 aa, synthetic construct
SGSVLSLREKRGIDE

SEQ ID NO: 2091 - protein, 15 aa, synthetic construct
STTSRRARFSPRPGN

SEQ ID NO: 2092 - protein, 15 aa, synthetic construct
SWPGRAPARRLGLRR

SEQ ID NO: 2093 - protein, 15 aa, synthetic construct
TAESVTAWYRSTSGI

SEQ ID NO: 2094 - protein, 15 aa, synthetic construct
TAFHSQLFFNSSSPT

SEQ ID NO: 2095 - protein, 15 aa, synthetic construct
TARDKEVADEGGGAA

SEQ ID NO: 2096 - protein, 15 aa, synthetic construct
TAWEETPRSRCHIAV

SEQ ID NO: 2097 - protein, 15 aa, synthetic construct
TDPAASGALCTPSRG

SEQ ID NO: 2098 - protein, 15 aa, synthetic construct
TEIRGCHSAVGYETL

SEQ ID NO: 2099 - protein, 15 aa, synthetic construct
TPSGSSGMRPRTRWR

SEQ ID NO: 2100 - protein, 15 aa, synthetic construct
VDLQEHALAAAAGHF

SEQ ID NO: 2101 - protein, 15 aa, synthetic construct
VHPSVGRVGDGARAL

SEQ ID NO: 2102 - protein, 15 aa, synthetic construct
VSRRKRASALLVFSH

SEQ ID NO: 2103 - protein, 15 aa, synthetic construct
VSTTAAATPAAAAAS

SEQ ID NO: 2104 - protein, 15 aa, synthetic construct
WLLSGGPQPRRPRAT

SEQ ID NO: 2105 - protein, 15 aa, synthetic construct
WPLPTRGTRRPRLTA

SEQ ID NO: 2106 - protein, 15 aa, synthetic construct
WPPLPDPPALAAPEQ

SEQ ID NO: 2107 - protein, 15 aa, synthetic construct
WPRRPPRYGRARGRR

SEQ ID NO: 2108 - protein, 15 aa, synthetic construct
WPRRPRASSRCSRVP

SEQ ID NO: 2109 - protein, 15 aa, synthetic construct
WRAPRRCRFTSSSPS

SEQ ID NO: 2110 - protein, 15 aa, synthetic construct
WRRPRSPSPTSSLTW

SEQ ID NO: 2111 - protein, 15 aa, synthetic construct
WSGRRRSRPGRERRA

SEQ ID NO: 2112 - protein, 15 aa, synthetic construct
WSPAPTWAGARGSRQ

SEQ ID NO: 2113 - protein, 15 aa, synthetic construct
YGKGTLQCWMDSTEK

SEQ ID NO: 2114 - protein, 15 aa, synthetic construct
AAAAGTRATQWLSPR

SEQ ID NO: 2115 - protein, 15 aa, synthetic construct
AAAEATAAVPAAAAA

SEQ ID NO: 2116 - protein, 15 aa, synthetic construct
AALLDARARARHRDL

SEQ ID NO: 2117 - protein, 15 aa, synthetic construct
AALLPGENALQPQGP

SEQ ID NO: 2118 - protein, 15 aa, synthetic construct
AALLPGGLASAARGG

SEQ ID NO: 2119 - protein, 15 aa, synthetic construct
AALLPGKEDQRGRLP

SEQ ID NO: 2120 - protein, 15 aa, synthetic construct
AALLRAPSAGPQPGG

SEQ ID NO: 2121 - protein, 15 aa, synthetic construct
AAPRAPRARRGRRGR

SEQ ID NO: 2122 - protein, 15 aa, synthetic construct
ADLPSLPPGAVHPLT

SEQ ID NO: 2123 - protein, 15 aa, synthetic construct
ADPPLHVSAAVSGNQ

SEQ ID NO: 2124 - protein, 15 aa, synthetic construct
ADRPRARLPCCRAVP

SEQ ID NO: 2125 - protein, 15 aa, synthetic construct
ADSPRCPRSPVSCPA

SEQ ID NO: 2126 - protein, 15 aa, synthetic construct
ADVPGKALSRGRRAS

SEQ ID NO: 2127 - protein, 15 aa, synthetic construct
AFRQADRGAAMAVQA

SEQ ID NO: 2128 - protein, 15 aa, synthetic construct
AGGHARPVARPAQPG

SEQ ID NO: 2129 - protein, 15 aa, synthetic construct
AGRGGAGRGAGGRGR

SEQ ID NO: 2130 - protein, 15 aa, synthetic construct
AKTPTVESRSTAGCE

SEQ ID NO: 2131 - protein, 15 aa, synthetic construct
ALGAAAPPRGAAGAG

SEQ ID NO: 2132 - protein, 15 aa, synthetic construct
ALGAAPRVPAPTAPA

SEQ ID NO: 2133 - protein, 15 aa, synthetic construct
ALLLAETRDAFPAVH

SEQ ID NO: 2134 - protein, 15 aa, synthetic construct
ALLLPGDHRVPGGRR

SEQ ID NO: 2135 - protein, 15 aa, synthetic construct
APAPARLRARLRPPH

SEQ ID NO: 2136 - protein, 15 aa, synthetic construct
AQAHGRLPRLQVPAP

SEQ ID NO: 2137 - protein, 15 aa, synthetic construct
AQLGAPGSSGPPRSG

SEQ ID NO: 2138 - protein, 15 aa, synthetic construct
AQLLPLRAQLHVVAQ

SEQ ID NO: 2139 - protein, 15 aa, synthetic construct
AQTLQSPLRQGCPEP

SEQ ID NO: 2140 - protein, 15 aa, synthetic construct
ARAPGTAQCGGRGAG

SEQ ID NO: 2141 - protein, 15 aa, synthetic construct
ASMAALCGTAPRAPT

SEQ ID NO: 2142 - protein, 15 aa, synthetic construct
AVGRGPAVGVGRAAP

SEQ ID NO: 2143 - protein, 15 aa, synthetic construct
AWVPAQGTRPPGLVP

SEQ ID NO: 2144 - protein, 15 aa, synthetic construct
CLFSFSWAQSFCSAH

SEQ ID NO: 2145 - protein, 15 aa, synthetic construct
CPGFAAGRPGVWRCP

SEQ ID NO: 2146 - protein, 15 aa, synthetic construct
CPSAKKAEAKGRARR

SEQ ID NO: 2147 - protein, 15 aa, synthetic construct
CRRRVAPASSRGCCR

SEQ ID NO: 2148 - protein, 15 aa, synthetic construct
CSRRCPGPWACWTPQ

SEQ ID NO: 2149 - protein, 15 aa, synthetic construct
DGSHRVSGCPRGRPA

SEQ ID NO: 2150 - protein, 15 aa, synthetic construct
EFSPDKTWVSTSKLA

SEQ ID NO: 2151 - protein, 15 aa, synthetic construct
EGPGAPGHGVPGHLQ

SEQ ID NO: 2152 - protein, 15 aa, synthetic construct
ELGAAAAREAALLVH

SEQ ID NO: 2153 - protein, 15 aa, synthetic construct
EPAADPPAPPLALPL

SEQ ID NO: 2154 - protein, 15 aa, synthetic construct
EPAPLQLRPTATPLL

SEQ ID NO: 2155 - protein, 15 aa, synthetic construct
EPGNPGSGGHARPVG

SEQ ID NO: 2156 - protein, 15 aa, synthetic construct
ESRTPRRRRSSSRST

SEQ ID NO: 2157 - protein, 15 aa, synthetic construct
GARGGRRRRSQAPRP

SEQ ID NO: 2158 - protein, 15 aa, synthetic construct
GARQRRHPQLAAPPI

SEQ ID NO: 2159 - protein, 15 aa, synthetic construct
GCPAVPEPQVPVKSP

SEQ ID NO: 2160 - protein, 15 aa, synthetic construct
GDTPLPSAAAPSLLA

SEQ ID NO: 2161 - protein, 15 aa, synthetic construct
GGGGRGGRRGPAAVT

SEQ ID NO: 2162 - protein, 15 aa, synthetic construct
GPPASRRPSWPAAPP

SEQ ID NO: 2163 - protein, 15 aa, synthetic construct
GQRAQPRPAAQAPYP

SEQ ID NO: 2164 - protein, 15 aa, synthetic construct
GRGGGAGGQEARAAG

SEQ ID NO: 2165 - protein, 15 aa, synthetic construct
GRRGGRPPAAAGPQR

SEQ ID NO: 2166 - protein, 15 aa, synthetic construct
GSAVRLRAGPGGYAA

SEQ ID NO: 2167 - protein, 15 aa, synthetic construct
GTQGKGRGVRGSALA

SEQ ID NO: 2168 - protein, 15 aa, synthetic construct
GVEKDAPAPKLLLPA

SEQ ID NO: 2169 - protein, 15 aa, synthetic construct
GVRPPARVCLPGCGF

SEQ ID NO: 2170 - protein, 15 aa, synthetic construct
GWHRGPGASTAGRRR

SEQ ID NO: 2171 - protein, 15 aa, synthetic construct
HHARAHLLLSHGHRR

SEQ ID NO: 2172 - protein, 15 aa, synthetic construct
HHPPDAPGRRRQERL

SEQ ID NO: 2173 - protein, 15 aa, synthetic construct
HHPPGRPLPRSRVRV

SEQ ID NO: 2174 - protein, 15 aa, synthetic construct
HHPPRSLEPRPRAPQ

SEQ ID NO: 2175 - protein, 15 aa, synthetic construct
LHAPALGPVFRVPLG

SEQ ID NO: 2176 - protein, 15 aa, synthetic construct
LTATGGARRRRLRAS

SEQ ID NO: 2177 - protein, 15 aa, synthetic construct
PAAPAAADSVRRRHL

SEQ ID NO: 2178 - protein, 15 aa, synthetic construct
PAAPAARPCILPGHP

SEQ ID NO: 2179 - protein, 15 aa, synthetic construct
PAAPARLAHRDPAGR

SEQ ID NO: 2180 - protein, 15 aa, synthetic construct
PAAPASRPPARPCPR

SEQ ID NO: 2181 - protein, 15 aa, synthetic construct
PAAPGGRRVLGPPRG

SEQ ID NO: 2182 - protein, 15 aa, synthetic construct
PAAPLLLPRQGQQEE

SEQ ID NO: 2183 - protein, 15 aa, synthetic construct
PAAPLRSPSSFLTTP

SEQ ID NO: 2184 - protein, 15 aa, synthetic construct
PAAPRLQQGGGHPAQ

SEQ ID NO: 2185 - protein, 15 aa, synthetic construct
PAAPSAARQDPFVAA

SEQ ID NO: 2186 - protein, 15 aa, synthetic construct
PAAPVETLSDARRQP

SEQ ID NO: 2187 - protein, 15 aa, synthetic construct
PAPEPAVAGPGGVTG

SEQ ID NO: 2188 - protein, 15 aa, synthetic construct
PAPLHHCPLQTHLLQ

SEQ ID NO: 2189 - protein, 15 aa, synthetic construct
PAPPWGAGAAWPRGA

SEQ ID NO: 2190 - protein, 15 aa, synthetic construct
PASPPRRRRRPPPPR

SEQ ID NO: 2191 - protein, 15 aa, synthetic construct
PASPRARARRRLPGS

SEQ ID NO: 2192 - protein, 15 aa, synthetic construct
PASPWRARLPAVPAR

SEQ ID NO: 2193 - protein, 15 aa, synthetic construct
PGAPIVGHGGRRQRG

SEQ ID NO: 2194 - protein, 15 aa, synthetic construct
PGAPLRGRQGHRRAD

SEQ ID NO: 2195 - protein, 15 aa, synthetic construct
PMGPRAGGQVLLPTV

SEQ ID NO: 2196 - protein, 15 aa, synthetic construct
PPAAPRRLPAPPGAQ

SEQ ID NO: 2197 - protein, 15 aa, synthetic construct
PPANSWPRKLPGKAP

SEQ ID NO: 2198 - protein, 15 aa, synthetic construct
PPAPRRSPRRSPLPR

SEQ ID NO: 2199 - protein, 15 aa, synthetic construct
PPASARAVPDMGPGT

SEQ ID NO: 2200 - protein, 15 aa, synthetic construct
PPATQRRPRSAWRPR

SEQ ID NO: 2201 - protein, 15 aa, synthetic construct
PPSPTRAGPTSRARR

SEQ ID NO: 2202 - protein, 15 aa, synthetic construct
PRAPSLTVSSDPAGP

SEQ ID NO: 2203 - protein, 15 aa, synthetic construct
PTRTRRPAPPPRTAA

SEQ ID NO: 2204 - protein, 15 aa, synthetic construct
PVGVAGGADRRALRA

SEQ ID NO: 2205 - protein, 15 aa, synthetic construct
PVPDPLPEAAGLGRA

SEQ ID NO: 2206 - protein, 15 aa, synthetic construct
QEPPGVLRAPQRAPA

SEQ ID NO: 2207 - protein, 15 aa, synthetic construct
QGPREPEGVEPRRVR

SEQ ID NO: 2208 - protein, 15 aa, synthetic construct
QQHSRFFRCSRHLRR

SEQ ID NO: 2209 - protein, 15 aa, synthetic construct
QQRNKPRAQSPSIIM

SEQ ID NO: 2210 - protein, 15 aa, synthetic construct
RARRGARAGLAGRPA

SEQ ID NO: 2211 - protein, 15 aa, synthetic construct
RASSPHPWQRPESRS

SEQ ID NO: 2212 - protein, 15 aa, synthetic construct
RGTRRPTAQRAVPSV

SEQ ID NO: 2213 - protein, 15 aa, synthetic construct
RPGRRPAAGPRPTSA

SEQ ID NO: 2214 - protein, 15 aa, synthetic construct
RPRDPSPPRAGWRQP

SEQ ID NO: 2215 - protein, 15 aa, synthetic construct
RRGAAEAGPGGAVRG

SEQ ID NO: 2216 - protein, 15 aa, synthetic construct
SHAAARPQLHPTAGQ

SEQ ID NO: 2217 - protein, 15 aa, synthetic construct
SIPSYTRKKCHPNRG

SEQ ID NO: 2218 - protein, 15 aa, synthetic construct
SPPRPRPWPQSGRPQ

SEQ ID NO: 2219 - protein, 15 aa, synthetic construct
SSGHLWAASAVPCQP

SEQ ID NO: 2220 - protein, 15 aa, synthetic construct
TATTGPGPSARTRRR

SEQ ID NO: 2221 - protein, 15 aa, synthetic construct
TRAAAGFTRRAAAAI

SEQ ID NO: 2222 - protein, 15 aa, synthetic construct
TRAAATFTISRVRRT

SEQ ID NO: 2223 - protein, 15 aa, synthetic construct
TRAASPPAPPPSPRP

SEQ ID NO: 2224 - protein, 15 aa, synthetic construct
TRAGAAGPPARSRRA

SEQ ID NO: 2225 - protein, 15 aa, synthetic construct
TRAGPGRQNPPGSPT

SEQ ID NO: 2226 - protein, 15 aa, synthetic construct
TRAPTRRRSRARSRP

SEQ ID NO: 2227 - protein, 15 aa, synthetic construct
TRGAACLGAGEYRAE

SEQ ID NO: 2228 - protein, 15 aa, synthetic construct
TRPRGVASWPWETAG

SEQ ID NO: 2229 - protein, 15 aa, synthetic construct
TRSARPGGVAATSTR

SEQ ID NO: 2230 - protein, 15 aa, synthetic construct
TTVPPRKATRATRRR

SEQ ID NO: 2231 - protein, 15 aa, synthetic construct
VEGPRARRLRSFLGA

SEQ ID NO: 2232 - protein, 15 aa, synthetic construct
VPKAGGEEPAGQRQP

SEQ ID NO: 2233 - protein, 15 aa, synthetic construct
VRAGGAPVQGRRAQA

SEQ ID NO: 2234 - protein, 15 aa, synthetic construct
VRCGAAFGAYSTVCA

SEQ ID NO: 2235 - protein, 15 aa, synthetic construct
WALSVHNVPLFCCCP

SEQ ID NO: 2236 - protein, 15 aa, synthetic construct
WDPAPPATGPRPSTW

SEQ ID NO: 2237 - protein, 15 aa, synthetic construct
WGAALRAGRPRLRGG

SEQ ID NO: 2238 - protein, 15 aa, synthetic construct
WMIERIWCTRRSWPS

SEQ ID NO: 2239 - protein, 15 aa, synthetic construct
WRAARRGLRRALRRV

SEQ ID NO: 2240 - protein, 15 aa, synthetic construct
WSAPSCSRVPSRLRV

SEQ ID NO: 2241 - protein, 15 aa, synthetic construct
AAAGGQPRAAGGARE

SEQ ID NO: 2242 - protein, 15 aa, synthetic construct
AAARHLLPRLPEAGA

SEQ ID NO: 2243 - protein, 15 aa, synthetic construct
AGDQLRGRRRREPRR

SEQ ID NO: 2244 - protein, 15 aa, synthetic construct
AGSGRGAAEAPGARA

SEQ ID NO: 2245 - protein, 15 aa, synthetic construct
AHRAAECRGARGGQG

SEQ ID NO: 2246 - protein, 15 aa, synthetic construct
ALSCVRCSVAGWENV

SEQ ID NO: 2247 - protein, 15 aa, synthetic construct
AYPAPAHMRSASFSP

SEQ ID NO: 2248 - protein, 15 aa, synthetic construct
CRLKCGRSWRSWSWS

SEQ ID NO: 2249 - protein, 15 aa, synthetic construct
CVQRQSQSSGDVSSC

SEQ ID NO: 2250 - protein, 15 aa, synthetic construct
EAEFERAGFPQQAVD

SEQ ID NO: 2251 - protein, 15 aa, synthetic construct
EARRPPGALRGPVLQ

SEQ ID NO: 2252 - protein, 15 aa, synthetic construct
ELGAEAASHPDGSRE

SEQ ID NO: 2253 - protein, 15 aa, synthetic construct
GGARALGPPAPVPAA

SEQ ID NO: 2254 - protein, 15 aa, synthetic construct
GGTRPGAVAGRGGGA

SEQ ID NO: 2255 - protein, 15 aa, synthetic construct
GLGSQLPRLALCAPL

SEQ ID NO: 2256 - protein, 15 aa, synthetic construct
GPRGARAAAAEPAAL

SEQ ID NO: 2257 - protein, 15 aa, synthetic construct
GQHIHHHQEPQQQPP

SEQ ID NO: 2258 - protein, 15 aa, synthetic construct
GVGHQDDPDQANVRR

SEQ ID NO: 2259 - protein, 15 aa, synthetic construct
GYQEGKASQHGTSDE

SEQ ID NO: 2260 - protein, 15 aa, synthetic construct
PPFPWLLSTCECGAA

SEQ ID NO: 2261 - protein, 15 aa, synthetic construct
PPPPPPLSAGALGAR

SEQ ID NO: 2262 - protein, 15 aa, synthetic construct
RARLGRRRRARLAVA

SEQ ID NO: 2263 - protein, 15 aa, synthetic construct
RQRRGPRGAGARRAQ

SEQ ID NO: 2264 - protein, 15 aa, synthetic construct
RYAPSSSKSLDGKGL

SEQ ID NO: 2265 - protein, 15 aa, synthetic construct
VPGKLDICKSIFLPG

SEQ ID NO: 2266 - protein, 15 aa, synthetic construct
VPRLRAGAGCGQFCD

SEQ ID NO: 2267 - protein, 15 aa, synthetic construct
VYKDNPSPLGMFPPV

SEQ ID NO: 2268 - protein, 15 aa, synthetic construct
WAPPAPPRWRALSSS

SEQ ID NO: 2269 - protein, 15 aa, synthetic construct
WAPPPAPGEPCRSSR

SEQ ID NO: 2270 - protein, 15 aa, synthetic construct
WAPPPLRPGGGLRRG

SEQ ID NO: 2271 - protein, 15 aa, synthetic construct
WEKSAVFQPNYLSAA

SEQ ID NO: 2272 - protein, 15 aa, synthetic construct
WRGPSAGAPCSCACC

SEQ ID NO: 2273 - protein, 15 aa, synthetic construct
WTREEREWPLPPPLL

SEQ ID NO: 2274 - protein, 15 aa, synthetic construct
AAAAAVAPAAPGARG

SEQ ID NO: 2275 - protein, 15 aa, synthetic construct
AAAATPPSPQRPWPA

SEQ ID NO: 2276 - protein, 15 aa, synthetic construct
AAGGGGAAAGASARG

SEQ ID NO: 2277 - protein, 15 aa, synthetic construct
AAPAALPAHLPGAGS

SEQ ID NO: 2278 - protein, 15 aa, synthetic construct
AAPAAVRPPAVGPPA

SEQ ID NO: 2279 - protein, 15 aa, synthetic construct
AAPDSSAGSASLRGA

SEQ ID NO: 2280 - protein, 15 aa, synthetic construct
AAPGECALPQFEKLE

SEQ ID NO: 2281 - protein, 15 aa, synthetic construct
AAPGPAAAAAPAGWR

SEQ ID NO: 2282 - protein, 15 aa, synthetic construct
AAPWPQPPPPGTLPG

SEQ ID NO: 2283 - protein, 15 aa, synthetic construct
AARGARAAPRSQDLR

SEQ ID NO: 2284 - protein, 15 aa, synthetic construct
AARSVPPAPLEAPSG

SEQ ID NO: 2285 - protein, 15 aa, synthetic construct
AAVPAAPLGPPEELG

SEQ ID NO: 2286 - protein, 15 aa, synthetic construct
ACRPPAPQPGREHLA

SEQ ID NO: 2287 - protein, 15 aa, synthetic construct
ADPAVAPAAAPALSS

SEQ ID NO: 2288 - protein, 15 aa, synthetic construct
ADPGGLARSPKAAAP

SEQ ID NO: 2289 - protein, 15 aa, synthetic construct
AGEASEREPRPQRWE

SEQ ID NO: 2290 - protein, 15 aa, synthetic construct
AGGAAAPAPGGRQPA

SEQ ID NO: 2291 - protein, 15 aa, synthetic construct
AGGGGGRGGGGGSGR

SEQ ID NO: 2292 - protein, 15 aa, synthetic construct
AGPARSRRPPAAPGP

SEQ ID NO: 2293 - protein, 15 aa, synthetic construct
ANRPEPPPLRLPAAR

SEQ ID NO: 2294 - protein, 15 aa, synthetic construct
APPPAPAARAVRCRH

SEQ ID NO: 2295 - protein, 15 aa, synthetic construct
APPPAPSAGGGRAQP

SEQ ID NO: 2296 - protein, 15 aa, synthetic construct
APPPSPRSPRPLPRR

SEQ ID NO: 2297 - protein, 15 aa, synthetic construct
ARHAGSPHFLLGGLR

SEQ ID NO: 2298 - protein, 15 aa, synthetic construct
ARTPAAPESGRLWLL

SEQ ID NO: 2299 - protein, 15 aa, synthetic construct
ASPASPSSPSWAGAP

SEQ ID NO: 2300 - protein, 15 aa, synthetic construct
ASPDAAQQSPIPHHQ

SEQ ID NO: 2301 - protein, 15 aa, synthetic construct
ATFLLSRNNVQKDAC

SEQ ID NO: 2302 - protein, 15 aa, synthetic construct
ATGPLSVAAAGPGGA

SEQ ID NO: 2303 - protein, 15 aa, synthetic construct
CCCRFYRCSPPPAPL

SEQ ID NO: 2304 - protein, 15 aa, synthetic construct
CGARPPASPSQRRRR

SEQ ID NO: 2305 - protein, 15 aa, synthetic construct
CGGGEPGLCSGCGGF

SEQ ID NO: 2306 - protein, 15 aa, synthetic construct
CGQVPPPPAPPPQLP

SEQ ID NO: 2307 - protein, 15 aa, synthetic construct
CPPAAPGPRPAVAAA

SEQ ID NO: 2308 - protein, 15 aa, synthetic construct
CPPASPLGRRGEGSA

SEQ ID NO: 2309 - protein, 15 aa, synthetic construct
CPPASPNPPAPLPRL

SEQ ID NO: 2310 - protein, 15 aa, synthetic construct
CPPPSPSVVTGPWAS

SEQ ID NO: 2311 - protein, 15 aa, synthetic construct
CPSREYRPPAAPQPA

SEQ ID NO: 2312 - protein, 15 aa, synthetic construct
CPTPAAPPLPTPSLR

SEQ ID NO: 2313 - protein, 15 aa, synthetic construct
CPTRITFPTTHSTQI

SEQ ID NO: 2314 - protein, 15 aa, synthetic construct
CRPAAPAPARAPAPA

SEQ ID NO: 2315 - protein, 15 aa, synthetic construct
CSPPPAPCGPRCPPR

SEQ ID NO: 2316 - protein, 15 aa, synthetic construct
CVIPAAPRAASQPAA

SEQ ID NO: 2317 - protein, 15 aa, synthetic construct
DHIPAAAAGAQPGLH

SEQ ID NO: 2318 - protein, 15 aa, synthetic construct
ELLRQLLWRPGLWLW

SEQ ID NO: 2319 - protein, 15 aa, synthetic construct
EVPGAPGLPPAGPLP

SEQ ID NO: 2320 - protein, 15 aa, synthetic construct
EVQGALRAPQPDPVR

SEQ ID NO: 2321 - protein, 15 aa, synthetic construct
FPYHASPPAAPLCPF

SEQ ID NO: 2322 - protein, 15 aa, synthetic construct
GAAHLPHGGVRAAAA

SEQ ID NO: 2323 - protein, 15 aa, synthetic construct
GAASHPTGFRQGDGR

SEQ ID NO: 2324 - protein, 15 aa, synthetic construct
GAGAGGGRRGGSPDP

SEQ ID NO: 2325 - protein, 15 aa, synthetic construct
GAGAGLRGRGRAALR

SEQ ID NO: 2326 - protein, 15 aa, synthetic construct
GAGRGAGTARRPPSS

SEQ ID NO: 2327 - protein, 15 aa, synthetic construct
GAHGTYGAHGTYGAH

SEQ ID NO: 2328 - protein, 15 aa, synthetic construct
GALPGPSDAALRPQL

SEQ ID NO: 2329 - protein, 15 aa, synthetic construct
GAPQDYDAAQVAAAG

SEQ ID NO: 2330 - protein, 15 aa, synthetic construct
GAQVPAAPGVPLRPV

SEQ ID NO: 2331 - protein, 15 aa, synthetic construct
GARPLPSVPPPAPGH

SEQ ID NO: 2332 - protein, 15 aa, synthetic construct
GGAGAGGGGSGCLTD

SEQ ID NO: 2333 - protein, 15 aa, synthetic construct
GGGGGGGGARHPLAA

SEQ ID NO: 2334 - protein, 15 aa, synthetic construct
GGRLLRRGPRRGRPG

SEQ ID NO: 2335 - protein, 15 aa, synthetic construct
GGSQRWGNPAAPALA

SEQ ID NO: 2336 - protein, 15 aa, synthetic construct
GGVCGAPAAAGPGAG

SEQ ID NO: 2337 - protein, 15 aa, synthetic construct
GHLPTSNQRPPAAPR

SEQ ID NO: 2338 - protein, 15 aa, synthetic construct
GLHRRPRGAGSARPC

SEQ ID NO: 2339 - protein, 15 aa, synthetic construct
GLRGPPAAPLSQLHD

SEQ ID NO: 2340 - protein, 15 aa, synthetic construct
GPAPGEPRRRGGRRL

SEQ ID NO: 2341 - protein, 15 aa, synthetic construct
GPGDIDPCDPRAAHP

SEQ ID NO: 2342 - protein, 15 aa, synthetic construct
GPGPPHCVPEGPAHP

SEQ ID NO: 2343 - protein, 15 aa, synthetic construct
GPPASRAVGSLRTVD

SEQ ID NO: 2344 - protein, 15 aa, synthetic construct
GPPDSFGRHPPRGSP

SEQ ID NO: 2345 - protein, 15 aa, synthetic construct
GPPLQPPAAPQRRPL

SEQ ID NO: 2346 - protein, 15 aa, synthetic construct
GPPPARPPATARRTA

SEQ ID NO: 2347 - protein, 15 aa, synthetic construct
GPPPPQGCAREAGGA

SEQ ID NO: 2348 - protein, 15 aa, synthetic construct
GPPSAPAWGRMDSSS

SEQ ID NO: 2349 - protein, 15 aa, synthetic construct
GPVPVPGAPRPGAPA

SEQ ID NO: 2350 - protein, 15 aa, synthetic construct
GPVSEPELVPLQAHQ

SEQ ID NO: 2351 - protein, 15 aa, synthetic construct
GRSAQIHQTAQQAWH

SEQ ID NO: 2352 - protein, 15 aa, synthetic construct
GRVPQPPPAPCPAPR

SEQ ID NO: 2353 - protein, 15 aa, synthetic construct
GSCHNPAAPNHFQNL

SEQ ID NO: 2354 - protein, 15 aa, synthetic construct
GSGAGTPRSSAACGT

SEQ ID NO: 2355 - protein, 15 aa, synthetic construct
GWGLAPPGAPSAQTR

SEQ ID NO: 2356 - protein, 15 aa, synthetic construct
HLLRPPAAPARGARS

SEQ ID NO: 2357 - protein, 15 aa, synthetic construct
HPLPAAPTGAGRVPG

SEQ ID NO: 2358 - protein, 15 aa, synthetic construct
ILPPSAPPSSPSALR

SEQ ID NO: 2359 - protein, 15 aa, synthetic construct
IRSALSAASGLWRRK

SEQ ID NO: 2360 - protein, 15 aa, synthetic construct
LCARGAGTRRARGQR

SEQ ID NO: 2361 - protein, 15 aa, synthetic construct
LEVPAAPEARQAAAA

SEQ ID NO: 2362 - protein, 15 aa, synthetic construct
LMAAPSPAAASPAAA

SEQ ID NO: 2363 - protein, 15 aa, synthetic construct
LTSLLGRNMKISARQ

SEQ ID NO: 2364 - protein, 15 aa, synthetic construct
NAAVEVRGPGRLPGP

SEQ ID NO: 2365 - protein, 15 aa, synthetic construct
NPAAAAPAAACVQSV

SEQ ID NO: 2366 - protein, 15 aa, synthetic construct
NPAPPARACSSRWAE

SEQ ID NO: 2367 - protein, 15 aa, synthetic construct
NPTAPTPAAQWAWSS

SEQ ID NO: 2368 - protein, 15 aa, synthetic construct
NSSSPPQGLQRRRRH

SEQ ID NO: 2369 - protein, 15 aa, synthetic construct
NTTSAGAASARRGPR

SEQ ID NO: 2370 - protein, 15 aa, synthetic construct
PAAAAAAAAAPAAPA

SEQ ID NO: 2371 - protein, 15 aa, synthetic construct
PAAAAAAAATIAAAS

SEQ ID NO: 2372 - protein, 15 aa, synthetic construct
PAAAAAAAPRSGRRL

SEQ ID NO: 2373 - protein, 15 aa, synthetic construct
PAAAAAPGPRAMAPS

SEQ ID NO: 2374 - protein, 15 aa, synthetic construct
PAAAAAVADGGATHH

SEQ ID NO: 2375 - protein, 15 aa, synthetic construct
PAAAAGRGVGRWRGG

SEQ ID NO: 2376 - protein, 15 aa, synthetic construct
PAAAAGSRCCSPCCS

SEQ ID NO: 2377 - protein, 15 aa, synthetic construct
PAAAALARGQQRARA

SEQ ID NO: 2378 - protein, 15 aa, synthetic construct
PAAAARPRPASVRVA

SEQ ID NO: 2379 - protein, 15 aa, synthetic construct
PAAAASLSAVAAAAA

SEQ ID NO: 2380 - protein, 15 aa, synthetic construct
PAAAASRCAGPSTVA

SEQ ID NO: 2381 - protein, 15 aa, synthetic construct
PAAADAAGPRRHVLV

SEQ ID NO: 2382 - protein, 15 aa, synthetic construct
PAAAEAQGQSPPLPE

SEQ ID NO: 2383 - protein, 15 aa, synthetic construct
PAAAGALRGRPGPGR

SEQ ID NO: 2384 - protein, 15 aa, synthetic construct
PAAAGAPRGHRCLSR

SEQ ID NO: 2385 - protein, 15 aa, synthetic construct
PAAAGGPGGRRRLQP

SEQ ID NO: 2386 - protein, 15 aa, synthetic construct
PAAAGGRGGRPRAGP

SEQ ID NO: 2387 - protein, 15 aa, synthetic construct
PAAAGKAPIRTATSQ

SEQ ID NO: 2388 - protein, 15 aa, synthetic construct
PAAAKPGGGSGCRPS

SEQ ID NO: 2389 - protein, 15 aa, synthetic construct
PAAALPTGRPGAQRS

SEQ ID NO: 2390 - protein, 15 aa, synthetic construct
PAAALQAVGHPAASP

SEQ ID NO: 2391 - protein, 15 aa, synthetic construct
PAAALTQPAGQRAGG

SEQ ID NO: 2392 - protein, 15 aa, synthetic construct
PAAAPDRGGHPFRHG

SEQ ID NO: 2393 - protein, 15 aa, synthetic construct
PAAAPGPQRAQLLLP

SEQ ID NO: 2394 - protein, 15 aa, synthetic construct
PAAAQGRDGGRGWGS

SEQ ID NO: 2395 - protein, 15 aa, synthetic construct
PAAARARPGRHGRRT

SEQ ID NO: 2396 - protein, 15 aa, synthetic construct
PAAARCSSPGRPCAS

SEQ ID NO: 2397 - protein, 15 aa, synthetic construct
PAAARRPRLRGLQRA

SEQ ID NO: 2398 - protein, 15 aa, synthetic construct
PAAASALGAPVLPTA

SEQ ID NO: 2399 - protein, 15 aa, synthetic construct
PAAASPAVPSPAAVS

SEQ ID NO: 2400 - protein, 15 aa, synthetic construct
PAAATLSSHGAAPSW

SEQ ID NO: 2401 - protein, 15 aa, synthetic construct
PAAATPRAGPPAASG

SEQ ID NO: 2402 - protein, 15 aa, synthetic construct
PAACPACASARAAPA

SEQ ID NO: 2403 - protein, 15 aa, synthetic construct
PAACPGRGGGGGRGD

SEQ ID NO: 2404 - protein, 15 aa, synthetic construct
PAADAGAVRDQGPRP

SEQ ID NO: 2405 - protein, 15 aa, synthetic construct
PAAEPLGRGLPPGCR

SEQ ID NO: 2406 - protein, 15 aa, synthetic construct
PAAGAAEARGLAAPP

SEQ ID NO: 2407 - protein, 15 aa, synthetic construct
PAAGAGLHQRRRGPR

SEQ ID NO: 2408 - protein, 15 aa, synthetic construct
PAAGGTRRGAPQRPA

SEQ ID NO: 2409 - protein, 15 aa, synthetic construct
PAAGPLPAIARSLLL

SEQ ID NO: 2410 - protein, 15 aa, synthetic construct
PAAGSLCGGAARAPP

SEQ ID NO: 2411 - protein, 15 aa, synthetic construct
PAAGSSLCLGLLGSL

SEQ ID NO: 2412 - protein, 15 aa, synthetic construct
PAAGTPAVHPALRAA

SEQ ID NO: 2413 - protein, 15 aa, synthetic construct
PAAGWAGSRPPAGAG

SEQ ID NO: 2414 - protein, 15 aa, synthetic construct
PAAHALAAATASPAA

SEQ ID NO: 2415 - protein, 15 aa, synthetic construct
PAAHLHREEGRRRRP

SEQ ID NO: 2416 - protein, 15 aa, synthetic construct
PAAKSAKSFPRRLRD

SEQ ID NO: 2417 - protein, 15 aa, synthetic construct
PAALAACAWCSSVTL

SEQ ID NO: 2418 - protein, 15 aa, synthetic construct
PAALHSLHEGGQGAR

SEQ ID NO: 2419 - protein, 15 aa, synthetic construct
PAANPAATSPAAASP

SEQ ID NO: 2420 - protein, 15 aa, synthetic construct
PAAPAAAAARAVERL

SEQ ID NO: 2421 - protein, 15 aa, synthetic construct
PAAPHSAAASRGGPF

SEQ ID NO: 2422 - protein, 15 aa, synthetic construct
PAAPLPPAAEQPPGG

SEQ ID NO: 2423 - protein, 15 aa, synthetic construct
PAAPPAAGGAGAWMD

SEQ ID NO: 2424 - protein, 15 aa, synthetic construct
PAAPRSPHGRTRRGA

SEQ ID NO: 2425 - protein, 15 aa, synthetic construct
PAAQPPGGVALGRGL

SEQ ID NO: 2426 - protein, 15 aa, synthetic construct
PAARCACSGPSCAAR

SEQ ID NO: 2427 - protein, 15 aa, synthetic construct
PAAREGRGRGLRRRR

SEQ ID NO: 2428 - protein, 15 aa, synthetic construct
PAARRLGRGSACCGP

SEQ ID NO: 2429 - protein, 15 aa, synthetic construct
PAARRPAHATDARPR

SEQ ID NO: 2430 - protein, 15 aa, synthetic construct
PAARSALCSCCSCCC

SEQ ID NO: 2431 - protein, 15 aa, synthetic construct
PAASAAAGDAEPGQC

SEQ ID NO: 2432 - protein, 15 aa, synthetic construct
PAASEGFRGSHPAAH

SEQ ID NO: 2433 - protein, 15 aa, synthetic construct
PAASLASSRSPTRDG

SEQ ID NO: 2434 - protein, 15 aa, synthetic construct
PAASPSPGLPRTHAR

SEQ ID NO: 2435 - protein, 15 aa, synthetic construct
PAASRPAPAGKRAAT

SEQ ID NO: 2436 - protein, 15 aa, synthetic construct
PAASTARAAGCGRSV

SEQ ID NO: 2437 - protein, 15 aa, synthetic construct
PAATAGKRRLPVPNV

SEQ ID NO: 2438 - protein, 15 aa, synthetic construct
PAATGGQHPSYQDHQ

SEQ ID NO: 2439 - protein, 15 aa, synthetic construct
PAATVHGPRDTGPPL

SEQ ID NO: 2440 - protein, 15 aa, synthetic construct
PAAVGAGRRARRAAS

SEQ ID NO: 2441 - protein, 15 aa, synthetic construct
PAAVPRHRIPEHAAA

SEQ ID NO: 2442 - protein, 15 aa, synthetic construct
PAAVSPVAASQAVDH

SEQ ID NO: 2443 - protein, 15 aa, synthetic construct
PAAVSQFAASARSEA

SEQ ID NO: 2444 - protein, 15 aa, synthetic construct
PAGADLPRGAGRCLH

SEQ ID NO: 2445 - protein, 15 aa, synthetic construct
PAGAPSWRPSGSRSS

SEQ ID NO: 2446 - protein, 15 aa, synthetic construct
PAGARTSPCGGRSKP

SEQ ID NO: 2447 - protein, 15 aa, synthetic construct
PAGLPQLPAELHGRC

SEQ ID NO: 2448 - protein, 15 aa, synthetic construct
PAGPDPNPPATPAPD

SEQ ID NO: 2449 - protein, 15 aa, synthetic construct
PAGPEALGLRQQRAA

SEQ ID NO: 2450 - protein, 15 aa, synthetic construct
PAGPELRGMGTQEGG

SEQ ID NO: 2451 - protein, 15 aa, synthetic construct
PAGPRDRRAGRGRGA

SEQ ID NO: 2452 - protein, 15 aa, synthetic construct
PAHPTRAAKPVLCPV

SEQ ID NO: 2453 - protein, 15 aa, synthetic construct
PAHPVAQRGLRGAAQ

SEQ ID NO: 2454 - protein, 15 aa, synthetic construct
PAHPVRHPGRPAARL

SEQ ID NO: 2455 - protein, 15 aa, synthetic construct
PAHVSTVGHPGSHRP

SEQ ID NO: 2456 - protein, 15 aa, synthetic construct
PAKAPSRCLSSGQRA

SEQ ID NO: 2457 - protein, 15 aa, synthetic construct
PAPAAPPLRPERPGC

SEQ ID NO: 2458 - protein, 15 aa, synthetic construct
PAPAARAVRAGGLPG

SEQ ID NO: 2459 - protein, 15 aa, synthetic construct
PAPAESAVPGRCWKC

SEQ ID NO: 2460 - protein, 15 aa, synthetic construct
PAPALLAAPRGLRRP

SEQ ID NO: 2461 - protein, 15 aa, synthetic construct
PAPAPARPPTAAAPG

SEQ ID NO: 2462 - protein, 15 aa, synthetic construct
PAPAPHGSAGLLAAP

SEQ ID NO: 2463 - protein, 15 aa, synthetic construct
PAPAPPPVGRPAGPA

SEQ ID NO: 2464 - protein, 15 aa, synthetic construct
PAPAPRRTRTPRRRA

SEQ ID NO: 2465 - protein, 15 aa, synthetic construct
PAPAVALVGAPRGAV

SEQ ID NO: 2466 - protein, 15 aa, synthetic construct
PAPAVAPVGAPRGAV

SEQ ID NO: 2467 - protein, 15 aa, synthetic construct
PAPCCLLPRARPPTT

SEQ ID NO: 2468 - protein, 15 aa, synthetic construct
PAPCSFGLYFCLQPH

SEQ ID NO: 2469 - protein, 15 aa, synthetic construct
PAPFPRSSISSSLLC

SEQ ID NO: 2470 - protein, 15 aa, synthetic construct
PAPGFAGGGRLAAAS

SEQ ID NO: 2471 - protein, 15 aa, synthetic construct
PAPGGPDAPAPTLGC

SEQ ID NO: 2472 - protein, 15 aa, synthetic construct
PAPGPSAPPPCALSR

SEQ ID NO: 2473 - protein, 15 aa, synthetic construct
PAPHPGLQRHLRLRP

SEQ ID NO: 2474 - protein, 15 aa, synthetic construct
PAPKTIPQQTHGTAP

SEQ ID NO: 2475 - protein, 15 aa, synthetic construct
PAPLCAQAARAATLQ

SEQ ID NO: 2476 - protein, 15 aa, synthetic construct
PAPLLLHCPGLLQRD

SEQ ID NO: 2477 - protein, 15 aa, synthetic construct
PAPLPLQRRAARRLP

SEQ ID NO: 2478 - protein, 15 aa, synthetic construct
PAPLSSAAPIPGSSL

SEQ ID NO: 2479 - protein, 15 aa, synthetic construct
PAPPPAREPALVRSA

SEQ ID NO: 2480 - protein, 15 aa, synthetic construct
PAPPRDLHAPGRRRP

SEQ ID NO: 2481 - protein, 15 aa, synthetic construct
PAPPSAARRPRARRA

SEQ ID NO: 2482 - protein, 15 aa, synthetic construct
PAPRAHAATTAGKPP

SEQ ID NO: 2483 - protein, 15 aa, synthetic construct
PAPRLSPSPPQRPPP

SEQ ID NO: 2484 - protein, 15 aa, synthetic construct
PAPRPRAHRCALGRG

SEQ ID NO: 2485 - protein, 15 aa, synthetic construct
PAPRRGPRLADPARP

SEQ ID NO: 2486 - protein, 15 aa, synthetic construct
PAPRRPWPWPCSRPG

SEQ ID NO: 2487 - protein, 15 aa, synthetic construct
PAPSQRTSPPAAAAS

SEQ ID NO: 2488 - protein, 15 aa, synthetic construct
PAPSRAAWRLPHGAP

SEQ ID NO: 2489 - protein, 15 aa, synthetic construct
PAPSSGPWPLRSTCT

SEQ ID NO: 2490 - protein, 15 aa, synthetic construct
PAPSSSSPLWPGPTG

SEQ ID NO: 2491 - protein, 15 aa, synthetic construct
PAPSTARSCTACPAG

SEQ ID NO: 2492 - protein, 15 aa, synthetic construct
PAPSVPSPCPNSDSC

SEQ ID NO: 2493 - protein, 15 aa, synthetic construct
PAPTAAAAAPAAGEE

SEQ ID NO: 2494 - protein, 15 aa, synthetic construct
PAPTAPAAAAARRAQ

SEQ ID NO: 2495 - protein, 15 aa, synthetic construct
PAPTASAAPTPQCPA

SEQ ID NO: 2496 - protein, 15 aa, synthetic construct
PAPTQRHRLRHHRAG

SEQ ID NO: 2497 - protein, 15 aa, synthetic construct
PAPVPLPLPLPLPLP

SEQ ID NO: 2498 - protein, 15 aa, synthetic construct
PAPVRGAAARDAEST

SEQ ID NO: 2499 - protein, 15 aa, synthetic construct
PAPWRLGPGWPEAPL

SEQ ID NO: 2500 - protein, 15 aa, synthetic construct
PASAPLHPRLAEPGF

SEQ ID NO: 2501 - protein, 15 aa, synthetic construct
PASAQGLHGVALLRR

SEQ ID NO: 2502 - protein, 15 aa, synthetic construct
PASARAAAAAATAAA

SEQ ID NO: 2503 - protein, 15 aa, synthetic construct
PASLPGGVRGRARAG

SEQ ID NO: 2504 - protein, 15 aa, synthetic construct
PASPQRAQLHPPGHV

SEQ ID NO: 2505 - protein, 15 aa, synthetic construct
PASPRRLVPAGAAFL

SEQ ID NO: 2506 - protein, 15 aa, synthetic construct
PASPSAATRRRARWT

SEQ ID NO: 2507 - protein, 15 aa, synthetic construct
PASRPLDLVGVQHPL

SEQ ID NO: 2508 - protein, 15 aa, synthetic construct
PASRWREPSGRWSGR

SEQ ID NO: 2509 - protein, 15 aa, synthetic construct
PASSSSPSWWTSWAT

SEQ ID NO: 2510 - protein, 15 aa, synthetic construct
PASTCSAASCPPCTT

SEQ ID NO: 2511 - protein, 15 aa, synthetic construct
PASTHPSGGALRSPG

SEQ ID NO: 2512 - protein, 15 aa, synthetic construct
PASTTSPASCGTTRG

SEQ ID NO: 2513 - protein, 15 aa, synthetic construct
PAVAPAAGRGLPAAA

SEQ ID NO: 2514 - protein, 15 aa, synthetic construct
PAVAPVGAPRGAVAP

SEQ ID NO: 2515 - protein, 15 aa, synthetic construct
PAVPTRWAPLARPGR

SEQ ID NO: 2516 - protein, 15 aa, synthetic construct
PDAPGGGAGLGQRDV

SEQ ID NO: 2517 - protein, 15 aa, synthetic construct
PFAPSPPPGIRLLRT

SEQ ID NO: 2518 - protein, 15 aa, synthetic construct
PGAAEALLPPGAAAT

SEQ ID NO: 2519 - protein, 15 aa, synthetic construct
PGAALGVAAAAHAGI

SEQ ID NO: 2520 - protein, 15 aa, synthetic construct
PGAARAPLPPARGAA

SEQ ID NO: 2521 - protein, 15 aa, synthetic construct
PGACALPGARDLGAR

SEQ ID NO: 2522 - protein, 15 aa, synthetic construct
PGALSAWPGHEQQRV

SEQ ID NO: 2523 - protein, 15 aa, synthetic construct
PGAPATPRGRPAAEG

SEQ ID NO: 2524 - protein, 15 aa, synthetic construct
PGAPGPAGRLEPLRG

SEQ ID NO: 2525 - protein, 15 aa, synthetic construct
PGAPGRLCTRTPRRR

SEQ ID NO: 2526 - protein, 15 aa, synthetic construct
PGAPLAAGARSPESA

SEQ ID NO: 2527 - protein, 15 aa, synthetic construct
PGAPLAGRPGCLCPR

SEQ ID NO: 2528 - protein, 15 aa, synthetic construct
PGAPLHCARGARGAQ

SEQ ID NO: 2529 - protein, 15 aa, synthetic construct
PGAPLRLSGTSTPTS

SEQ ID NO: 2530 - protein, 15 aa, synthetic construct
PGAPQPSQQDPSALA

SEQ ID NO: 2531 - protein, 15 aa, synthetic construct
PGAPVFRCSFPGNRG

SEQ ID NO: 2532 - protein, 15 aa, synthetic construct
PGGPGLRRGAAGLGR

SEQ ID NO: 2533 - protein, 15 aa, synthetic construct
PGGPRGGEARRAGAT

SEQ ID NO: 2534 - protein, 15 aa, synthetic construct
PGHPVLRGPLPAAPL

SEQ ID NO: 2535 - protein, 15 aa, synthetic construct
PGNASCSAHCAASRG

SEQ ID NO: 2536 - protein, 15 aa, synthetic construct
PGNPAPQHCEAATPV

SEQ ID NO: 2537 - protein, 15 aa, synthetic construct
PGPCLGRCAKGRHPR

SEQ ID NO: 2538 - protein, 15 aa, synthetic construct
PGPGGTGCRLAHLQG

SEQ ID NO: 2539 - protein, 15 aa, synthetic construct
PGPGPDQADAATRGE

SEQ ID NO: 2540 - protein, 15 aa, synthetic construct
PGPGVWAACRAAPSW

SEQ ID NO: 2541 - protein, 15 aa, synthetic construct
PGPKGQHQLVSRGRR

SEQ ID NO: 2542 - protein, 15 aa, synthetic construct
PGPLDLPGWLQRCPR

SEQ ID NO: 2543 - protein, 15 aa, synthetic construct
PGPLLVPPRPEPGGR

SEQ ID NO: 2544 - protein, 15 aa, synthetic construct
PGPPAPCSLGPPSSS

SEQ ID NO: 2545 - protein, 15 aa, synthetic construct
PGPPRGPSSNSATPQ

SEQ ID NO: 2546 - protein, 15 aa, synthetic construct
PGPRALPRRHPWRAG

SEQ ID NO: 2547 - protein, 15 aa, synthetic construct
PGPSPSPGPRRLLFQ

SEQ ID NO: 2548 - protein, 15 aa, synthetic construct
PGPTAGGCRAAAEAP

SEQ ID NO: 2549 - protein, 15 aa, synthetic construct
PGSPALRPHPQSLPV

SEQ ID NO: 2550 - protein, 15 aa, synthetic construct
PGSPESLAPEVPDSE

SEQ ID NO: 2551 - protein, 15 aa, synthetic construct
PGSPREPGVGGRCGG

SEQ ID NO: 2552 - protein, 15 aa, synthetic construct
PGSPRRVGWPVRGPR

SEQ ID NO: 2553 - protein, 15 aa, synthetic construct
PHAPGDAVGGRGSAD

SEQ ID NO: 2554 - protein, 15 aa, synthetic construct
PIATAKPTAPPVLPA

SEQ ID NO: 2555 - protein, 15 aa, synthetic construct
PLAGPRGQRGRGAPA

SEQ ID NO: 2556 - protein, 15 aa, synthetic construct
PLLGGPRRAARPGQP

SEQ ID NO: 2557 - protein, 15 aa, synthetic construct
PPAAAAPAAAAATAA

SEQ ID NO: 2558 - protein, 15 aa, synthetic construct
PPAAAAPAPAPGAQG

SEQ ID NO: 2559 - protein, 15 aa, synthetic construct
PPAAAAPSPEKRLGM

SEQ ID NO: 2560 - protein, 15 aa, synthetic construct
PPAAAQQPAALHHGP

SEQ ID NO: 2561 - protein, 15 aa, synthetic construct
PPAAGGAGAAGRARL

SEQ ID NO: 2562 - protein, 15 aa, synthetic construct
PPAAPDAGMRPDDGG

SEQ ID NO: 2563 - protein, 15 aa, synthetic construct
PPAAPRRPRRPRQPR

SEQ ID NO: 2564 - protein, 15 aa, synthetic construct
PPAAQGSRCPRAAPA

SEQ ID NO: 2565 - protein, 15 aa, synthetic construct
PPAASLLARGPQRKT

SEQ ID NO: 2566 - protein, 15 aa, synthetic construct
PPAEVPGPLSAGEAE

SEQ ID NO: 2567 - protein, 15 aa, synthetic construct
PPAGPPGLHAAAAPA

SEQ ID NO: 2568 - protein, 15 aa, synthetic construct
PPAGWRAGASVAAPG

SEQ ID NO: 2569 - protein, 15 aa, synthetic construct
PPAHARLAPRPAGTA

SEQ ID NO: 2570 - protein, 15 aa, synthetic construct
PPAPGGARGAGGAAA

SEQ ID NO: 2571 - protein, 15 aa, synthetic construct
PPASAWRRWASPSGS

SEQ ID NO: 2572 - protein, 15 aa, synthetic construct
PPASRWCPGPPRPPP

SEQ ID NO: 2573 - protein, 15 aa, synthetic construct
PPATALSSGAAPACA

SEQ ID NO: 2574 - protein, 15 aa, synthetic construct
PPAVPAGPVAAVAAT

SEQ ID NO: 2575 - protein, 15 aa, synthetic construct
PPGLRPLPPSMVSAK

SEQ ID NO: 2576 - protein, 15 aa, synthetic construct
PPGPAPGAPAVPRLL

SEQ ID NO: 2577 - protein, 15 aa, synthetic construct
PPGPGLLPLSMQLQP

SEQ ID NO: 2578 - protein, 15 aa, synthetic construct
PPGPRHPPRRPRPLG

SEQ ID NO: 2579 - protein, 15 aa, synthetic construct
PPPALLQPSAATAGA

SEQ ID NO: 2580 - protein, 15 aa, synthetic construct
PPPAPLGCARTSTPT

SEQ ID NO: 2581 - protein, 15 aa, synthetic construct
PPPAPLRSGSRRPRT

SEQ ID NO: 2582 - protein, 15 aa, synthetic construct
PPPAPPPPRPPVQPP

SEQ ID NO: 2583 - protein, 15 aa, synthetic construct
PPPAPPRPPSTAASS

SEQ ID NO: 2584 - protein, 15 aa, synthetic construct
PPPAPRRSRRRRGAR

SEQ ID NO: 2585 - protein, 15 aa, synthetic construct
PPPEGPSAEPALLPG

SEQ ID NO: 2586 - protein, 15 aa, synthetic construct
PPPPAPRGPSSWRSL

SEQ ID NO: 2587 - protein, 15 aa, synthetic construct
PPPPPLPPVAPKYQT

SEQ ID NO: 2588 - protein, 15 aa, synthetic construct
PPPPPRTPAQPRRAG

SEQ ID NO: 2589 - protein, 15 aa, synthetic construct
PPPPRPAPPPPRAAR

SEQ ID NO: 2590 - protein, 15 aa, synthetic construct
PPPPRPPAPRQPPLP

SEQ ID NO: 2591 - protein, 15 aa, synthetic construct
PPPRSSVTACVATGA

SEQ ID NO: 2592 - protein, 15 aa, synthetic construct
PPPSLPPAWPGGGRG

SEQ ID NO: 2593 - protein, 15 aa, synthetic construct
PPPSPRPHPRRPPRS

SEQ ID NO: 2594 - protein, 15 aa, synthetic construct
PPPTSTCPAWPSPIC

SEQ ID NO: 2595 - protein, 15 aa, synthetic construct
PPSAPRRNRRPRRGG

SEQ ID NO: 2596 - protein, 15 aa, synthetic construct
PPSGQPVPPEPQPQS

SEQ ID NO: 2597 - protein, 15 aa, synthetic construct
PPSPPRGARPLPRVP

SEQ ID NO: 2598 - protein, 15 aa, synthetic construct
PPSPTAAAPSAERCP

SEQ ID NO: 2599 - protein, 15 aa, synthetic construct
PQAPRARRTFSPSAF

SEQ ID NO: 2600 - protein, 15 aa, synthetic construct
PRGAPPPAPGSPAWR

SEQ ID NO: 2601 - protein, 15 aa, synthetic construct
PRGARVRPRPRERRH

SEQ ID NO: 2602 - protein, 15 aa, synthetic construct
PRPAAPAPRWRRAPA

SEQ ID NO: 2603 - protein, 15 aa, synthetic construct
PRWPPRSQPKSRRRS

SEQ ID NO: 2604 - protein, 15 aa, synthetic construct
PSAAPAPAASARAEP

SEQ ID NO: 2605 - protein, 15 aa, synthetic construct
PSAAPRGHQPRRQPA

SEQ ID NO: 2606 - protein, 15 aa, synthetic construct
PSAPAARSPVLGEER

SEQ ID NO: 2607 - protein, 15 aa, synthetic construct
PSAPKQPEQVPWDPP

SEQ ID NO: 2608 - protein, 15 aa, synthetic construct
PSAPPDALPGGLRRG

SEQ ID NO: 2609 - protein, 15 aa, synthetic construct
PSAPPVSSRRGRGAC

SEQ ID NO: 2610 - protein, 15 aa, synthetic construct
PSARDPRAPLQGAGD

SEQ ID NO: 2611 - protein, 15 aa, synthetic construct
PSGALGFRLCLQAVP

SEQ ID NO: 2612 - protein, 15 aa, synthetic construct
PSPAAAGTWGEPGPF

SEQ ID NO: 2613 - protein, 15 aa, synthetic construct
PSPAAVSPAAAPQAV

SEQ ID NO: 2614 - protein, 15 aa, synthetic construct
PSPLAGGFTWSPHFR

SEQ ID NO: 2615 - protein, 15 aa, synthetic construct
PSPPRTTYCPRTSNW

SEQ ID NO: 2616 - protein, 15 aa, synthetic construct
PSPRPPGPGWNLRPP

SEQ ID NO: 2617 - protein, 15 aa, synthetic construct
PSPSRSSRVASSGPS

SEQ ID NO: 2618 - protein, 15 aa, synthetic construct
PSPSSTASWSGAPPP

SEQ ID NO: 2619 - protein, 15 aa, synthetic construct
PSSPDSTSRTRSPTR

SEQ ID NO: 2620 - protein, 15 aa, synthetic construct
PSSPLQRRLQLARPC

SEQ ID NO: 2621 - protein, 15 aa, synthetic construct
PSSPNRTLPPGRSGT

SEQ ID NO: 2622 - protein, 15 aa, synthetic construct
PSSPSSRIFSQACLS

SEQ ID NO: 2623 - protein, 15 aa, synthetic construct
PTAAATSRKMEPGPW

SEQ ID NO: 2624 - protein, 15 aa, synthetic construct
PTAARWCPGAGGPAP

SEQ ID NO: 2625 - protein, 15 aa, synthetic construct
PTALFPLQTAHFGSR

SEQ ID NO: 2626 - protein, 15 aa, synthetic construct
PTAPGPERRPRARAS

SEQ ID NO: 2627 - protein, 15 aa, synthetic construct
PTAPGSASWWPSPWT

SEQ ID NO: 2628 - protein, 15 aa, synthetic construct
PTAPLPSRLQLQPRG

SEQ ID NO: 2629 - protein, 15 aa, synthetic construct
PTPPYSGRDPGAPGA

SEQ ID NO: 2630 - protein, 15 aa, synthetic construct
PTSPCRWSALWLPSR

SEQ ID NO: 2631 - protein, 15 aa, synthetic construct
PTSPTSAAIASPSLP

SEQ ID NO: 2632 - protein, 15 aa, synthetic construct
PTTTPPAAPTKTRGS

SEQ ID NO: 2633 - protein, 15 aa, synthetic construct
PTVAPQAFRSAAATG

SEQ ID NO: 2634 - protein, 15 aa, synthetic construct
PVAAPQAVDHPAASP

SEQ ID NO: 2635 - protein, 15 aa, synthetic construct
PVAGPGPASPLGGGV

SEQ ID NO: 2636 - protein, 15 aa, synthetic construct
PVAPLPAGHPVPGGA

SEQ ID NO: 2637 - protein, 15 aa, synthetic construct
PVAPSPSWAIVFTST

SEQ ID NO: 2638 - protein, 15 aa, synthetic construct
PVARAALLPWVLHGA

SEQ ID NO: 2639 - protein, 15 aa, synthetic construct
PVGPAAPAAASQAAV

SEQ ID NO: 2640 - protein, 15 aa, synthetic construct
PVLLPGAPGASEAFE

SEQ ID NO: 2641 - protein, 15 aa, synthetic construct
PVPAEDRHGVHTARP

SEQ ID NO: 2642 - protein, 15 aa, synthetic construct
PVPAPGGQPAIPPQT

SEQ ID NO: 2643 - protein, 15 aa, synthetic construct
PVPARRSLQLGHSGG

SEQ ID NO: 2644 - protein, 15 aa, synthetic construct
PVPGADLQHSAQELQ

SEQ ID NO: 2645 - protein, 15 aa, synthetic construct
PVPGGVQGPRGPSGG

SEQ ID NO: 2646 - protein, 15 aa, synthetic construct
PVPGPEILPVPLMPG

SEQ ID NO: 2647 - protein, 15 aa, synthetic construct
PVPGQPCPCRLCVGH

SEQ ID NO: 2648 - protein, 15 aa, synthetic construct
PVPHLLPALLQDPVL

SEQ ID NO: 2649 - protein, 15 aa, synthetic construct
PVPLRSPLRSRRHGA

SEQ ID NO: 2650 - protein, 15 aa, synthetic construct
PVPPFGVPDFLQHWS

SEQ ID NO: 2651 - protein, 15 aa, synthetic construct
PVPPPASPSPPAPAA

SEQ ID NO: 2652 - protein, 15 aa, synthetic construct
PVPQHRPGAPRDEPL

SEQ ID NO: 2653 - protein, 15 aa, synthetic construct
PVPSAAAAAVAAPAA

SEQ ID NO: 2654 - protein, 15 aa, synthetic construct
PVPSPARPRGPGAAR

SEQ ID NO: 2655 - protein, 15 aa, synthetic construct
PVPTTRCSCGWSAST

SEQ ID NO: 2656 - protein, 15 aa, synthetic construct
PVSNSCWLKIHLMNL

SEQ ID NO: 2657 - protein, 15 aa, synthetic construct
PWSPAAPAEPSRGPR

SEQ ID NO: 2658 - protein, 15 aa, synthetic construct
QALLRHEVPPPAAPE

SEQ ID NO: 2659 - protein, 15 aa, synthetic construct
QEIPPAPHHLGRRGD

SEQ ID NO: 2660 - protein, 15 aa, synthetic construct
QPPPAPPGLGCSRSG

SEQ ID NO: 2661 - protein, 15 aa, synthetic construct
RGAAGAAAGQSGGCR

SEQ ID NO: 2662 - protein, 15 aa, synthetic construct
RLPPAPRRPPPAPAT

SEQ ID NO: 2663 - protein, 15 aa, synthetic construct
RPAAPPSCQQPGAPL

SEQ ID NO: 2664 - protein, 15 aa, synthetic construct
RPAAPRCASPPGRFR

SEQ ID NO: 2665 - protein, 15 aa, synthetic construct
RPPAPGGQGLREPYP

SEQ ID NO: 2666 - protein, 15 aa, synthetic construct
RPRPAAPGAAVGFRG

SEQ ID NO: 2667 - protein, 15 aa, synthetic construct
RRGRGEGTRGTDGSG

SEQ ID NO: 2668 - protein, 15 aa, synthetic construct
RRKAGLGVRPAADPA

SEQ ID NO: 2669 - protein, 15 aa, synthetic construct
RRLSSGRACLRPCGA

SEQ ID NO: 2670 - protein, 15 aa, synthetic construct
RSRPPAAPGRRTVPA

SEQ ID NO: 2671 - protein, 15 aa, synthetic construct
RVGGAAAAAGAAPGG

SEQ ID NO: 2672 - protein, 15 aa, synthetic construct
SAAAAAAARPAQPQL

SEQ ID NO: 2673 - protein, 15 aa, synthetic construct
SAAAAAGAGCERVSS

SEQ ID NO: 2674 - protein, 15 aa, synthetic construct
SAAAGLVRRSQVRGV

SEQ ID NO: 2675 - protein, 15 aa, synthetic construct
SAERAAAAAAAAAAA

SEQ ID NO: 2676 - protein, 15 aa, synthetic construct
SAPPAAPGPGRDGGG

SEQ ID NO: 2677 - protein, 15 aa, synthetic construct
SARECGLRGSLLGTQ

SEQ ID NO: 2678 - protein, 15 aa, synthetic construct
SARTYGLATRTCGDW

SEQ ID NO: 2679 - protein, 15 aa, synthetic construct
SRAAGGAGAAGARGA

SEQ ID NO: 2680 - protein, 15 aa, synthetic construct
SRAPRPPRHPPAAPT

SEQ ID NO: 2681 - protein, 15 aa, synthetic construct
SRSWPLPPPAPAEPS

SEQ ID NO: 2682 - protein, 15 aa, synthetic construct
SSIAPVAWVALCGTL

SEQ ID NO: 2683 - protein, 15 aa, synthetic construct
SSLLAPLRRRAGRCL

SEQ ID NO: 2684 - protein, 15 aa, synthetic construct
SSQWASLTGQGLRTA

SEQ ID NO: 2685 - protein, 15 aa, synthetic construct
SSSSLCAARSARSAR

SEQ ID NO: 2686 - protein, 15 aa, synthetic construct
STLPLWQPPGLPSRD

SEQ ID NO: 2687 - protein, 15 aa, synthetic construct
TRAVGFSTPGARNSG

SEQ ID NO: 2688 - protein, 15 aa, synthetic construct
TRSRKDTSRCRGARP

SEQ ID NO: 2689 - protein, 15 aa, synthetic construct
VEDYARPRPGPPAAP

SEQ ID NO: 2690 - protein, 15 aa, synthetic construct
VGPDLPRTSGDVPED

SEQ ID NO: 2691 - protein, 15 aa, synthetic construct
VGPRRGRVPAAPAKP

SEQ ID NO: 2692 - protein, 15 aa, synthetic construct
VPAAPAAAGPGPCLR

SEQ ID NO: 2693 - protein, 15 aa, synthetic construct
VQLGLPSRLPTQLRF

SEQ ID NO: 2694 - protein, 15 aa, synthetic construct
VSASLSDAKRARRTA

SEQ ID NO: 2695 - protein, 15 aa, synthetic construct
WATRPAAPSSPRAPP

SEQ ID NO: 2696 - protein, 15 aa, synthetic construct
WGPETPAAPSETSTP

SEQ ID NO: 2697 - protein, 15 aa, synthetic construct
WGQVPPAAPWTGRAC

SEQ ID NO: 2698 - protein, 15 aa, synthetic construct
WNRPPPPAPSCSPRS

SEQ ID NO: 2699 - protein, 15 aa, synthetic construct
WPKCANSPNGSASLA

SEQ ID NO: 2700 - protein, 15 aa, synthetic construct
WPPAAPRSSGAACCS

SEQ ID NO: 2701 - protein, 15 aa, synthetic construct
WPPAPRRPPAAPGRR

SEQ ID NO: 2702 - protein, 15 aa, synthetic construct
WPPPAPGSAPAPARG

SEQ ID NO: 2703 - protein, 15 aa, synthetic construct
WPPPAPRAPPCCSPS

SEQ ID NO: 2704 - protein, 15 aa, synthetic construct
WPPPPPAPVSPTTTS

SEQ ID NO: 2705 - protein, 15 aa, synthetic construct
WPQPPAAPRPWPSSS

SEQ ID NO: 2706 - protein, 15 aa, synthetic construct
WPRPPPAPGARPWRA

SEQ ID NO: 2707 - protein, 15 aa, synthetic construct
WRLRPPARPPAAPGR

SEQ ID NO: 2708 - protein, 15 aa, synthetic construct
WSPAPTAPPPPAPPP

SEQ ID NO: 2709 - protein, 15 aa, synthetic construct
WTPPGAPGAKGPRQG

SEQ ID NO: 2710 - protein, 15 aa, synthetic construct
AALVSALAAAASAAA

SEQ ID NO: 2711 - protein, 15 aa, synthetic construct
AANAASQPPGSRGAG

SEQ ID NO: 2712 - protein, 15 aa, synthetic construct
AAQLRLLGLEDGGGL

SEQ ID NO: 2713 - protein, 15 aa, synthetic construct
AARARAPPRGAPAAR

SEQ ID NO: 2714 - protein, 15 aa, synthetic construct
AARARPRPPAPPGGA

SEQ ID NO: 2715 - protein, 15 aa, synthetic construct
AARGATAPAAPRDGA

SEQ ID NO: 2716 - protein, 15 aa, synthetic construct
AASAPRAARGPGRGG

SEQ ID NO: 2717 - protein, 15 aa, synthetic construct
AEVSAALQSVNRGFR

SEQ ID NO: 2718 - protein, 15 aa, synthetic construct
AGHGPGRGGSLRGGR

SEQ ID NO: 2719 - protein, 15 aa, synthetic construct
ALLQSRPLWPGPRVA

SEQ ID NO: 2720 - protein, 15 aa, synthetic construct
APCSWPSWGWGWARL

SEQ ID NO: 2721 - protein, 15 aa, synthetic construct
APRARAARALPGPER

SEQ ID NO: 2722 - protein, 15 aa, synthetic construct
ARRAARGRPLLRASA

SEQ ID NO: 2723 - protein, 15 aa, synthetic construct
ASRGALRPRGPQRPG

SEQ ID NO: 2724 - protein, 15 aa, synthetic construct
CPSPCSPPPATASAA

SEQ ID NO: 2725 - protein, 15 aa, synthetic construct
DARGAAPAAADRGLC

SEQ ID NO: 2726 - protein, 15 aa, synthetic construct
ELPANAGNGPREPGG

SEQ ID NO: 2727 - protein, 15 aa, synthetic construct
EQLGPPGFPRAAAGA

SEQ ID NO: 2728 - protein, 15 aa, synthetic construct
GAAAAARAARAAAPG

SEQ ID NO: 2729 - protein, 15 aa, synthetic construct
GARGAPAGPGSGRSR

SEQ ID NO: 2730 - protein, 15 aa, synthetic construct
GARGARRGPDPLPLA

SEQ ID NO: 2731 - protein, 15 aa, synthetic construct
GCPSQSSHPCQEFDH

SEQ ID NO: 2732 - protein, 15 aa, synthetic construct
GDSSRPADRLRGAAQ

SEQ ID NO: 2733 - protein, 15 aa, synthetic construct
GDSSRPAGGHCPPGL

SEQ ID NO: 2734 - protein, 15 aa, synthetic construct
GGARGARAERRRAGR

SEQ ID NO: 2735 - protein, 15 aa, synthetic construct
GGKWEPRHLGQRQRL

SEQ ID NO: 2736 - protein, 15 aa, synthetic construct
GGPAQAFPCAAAIVP

SEQ ID NO: 2737 - protein, 15 aa, synthetic construct
GISGIGVGRQAATPG

SEQ ID NO: 2738 - protein, 15 aa, synthetic construct
GMPAQFTLPPAPRDE

SEQ ID NO: 2739 - protein, 15 aa, synthetic construct
GPGAGRRGARWSGRD

SEQ ID NO: 2740 - protein, 15 aa, synthetic construct
GRRAARVRPCGAASA

SEQ ID NO: 2741 - protein, 15 aa, synthetic construct
GRSSRPREPAGPRPR

SEQ ID NO: 2742 - protein, 15 aa, synthetic construct
GVTEETLPEARIQVP

SEQ ID NO: 2743 - protein, 15 aa, synthetic construct
GWPDAGPWTPQKAAV

SEQ ID NO: 2744 - protein, 15 aa, synthetic construct
GWPERRADPRRGVHR

SEQ ID NO: 2745 - protein, 15 aa, synthetic construct
ISPSRDSLLRASMLP

SEQ ID NO: 2746 - protein, 15 aa, synthetic construct
PARGARAPKALHRRQ

SEQ ID NO: 2747 - protein, 15 aa, synthetic construct
PESSCRRPRPSAPAL

SEQ ID NO: 2748 - protein, 15 aa, synthetic construct
PHAQPGPGGAAWGGG

SEQ ID NO: 2749 - protein, 15 aa, synthetic construct
PLPPPHPGSGTASLP

SEQ ID NO: 2750 - protein, 15 aa, synthetic construct
PMDPIPTVSPSTTAR

SEQ ID NO: 2751 - protein, 15 aa, synthetic construct
PRAARAAAEPGPRTA

SEQ ID NO: 2752 - protein, 15 aa, synthetic construct
PSRAARVGPGQGRDS

SEQ ID NO: 2753 - protein, 15 aa, synthetic construct
QHRACGRRAARCARA

SEQ ID NO: 2754 - protein, 15 aa, synthetic construct
QPAAAAGGAPRREPP

SEQ ID NO: 2755 - protein, 15 aa, synthetic construct
RARGARGAGLAVHGQ

SEQ ID NO: 2756 - protein, 15 aa, synthetic construct
RGGSRELLPRGRRLR

SEQ ID NO: 2757 - protein, 15 aa, synthetic construct
RGRRRAAREPPRRRV

SEQ ID NO: 2758 - protein, 15 aa, synthetic construct
RKEPAARGAARAPGK

SEQ ID NO: 2759 - protein, 15 aa, synthetic construct
RLLGPRQRGAGHGRR

SEQ ID NO: 2760 - protein, 15 aa, synthetic construct
RLWLQPAAAAAGRRG

SEQ ID NO: 2761 - protein, 15 aa, synthetic construct
RRAAPRQVPVAGAGR

SEQ ID NO: 2762 - protein, 15 aa, synthetic construct
RRAARRPAPLGHLHQ

SEQ ID NO: 2763 - protein, 15 aa, synthetic construct
RRAGSLRICPRDRCR

SEQ ID NO: 2764 - protein, 15 aa, synthetic construct
SLLTGPDLLFPFPAA

SEQ ID NO: 2765 - protein, 15 aa, synthetic construct
SNRSRSARGPWRCTT

SEQ ID NO: 2766 - protein, 15 aa, synthetic construct
SRRAARPRLPRDCCG

SEQ ID NO: 2767 - protein, 15 aa, synthetic construct
SRSARGRGEMVPASS

SEQ ID NO: 2768 - protein, 15 aa, synthetic construct
SSFSPSPARAPLRPR

SEQ ID NO: 2769 - protein, 15 aa, synthetic construct
SSRPARLWPTGSSHS

SEQ ID NO: 2770 - protein, 15 aa, synthetic construct
SSRPRRTAGCGGSPT

SEQ ID NO: 2771 - protein, 15 aa, synthetic construct
STPTRLRAPPSPSAR

SEQ ID NO: 2772 - protein, 15 aa, synthetic construct
TARAPRPLPPAQLRW

SEQ ID NO: 2773 - protein, 15 aa, synthetic construct
TPGTPEIPRTLRTPG

SEQ ID NO: 2774 - protein, 15 aa, synthetic construct
TRRSARCTPKPSAWP

SEQ ID NO: 2775 - protein, 15 aa, synthetic construct
TSSWEPFPPPSLLST

SEQ ID NO: 2776 - protein, 15 aa, synthetic construct
VAAALRSRHLRRQPQ

SEQ ID NO: 2777 - protein, 15 aa, synthetic construct
VAPRAARGRRAPGQG

SEQ ID NO: 2778 - protein, 15 aa, synthetic construct
VHVRVPLAGGAPHPL

SEQ ID NO: 2779 - protein, 15 aa, synthetic construct
VRAARAAPGASRRAA

SEQ ID NO: 2780 - protein, 15 aa, synthetic construct
WGARRAARAAGCPSE

SEQ ID NO: 2781 - protein, 15 aa, synthetic construct
WIRCRRRSARCRRAP

SEQ ID NO: 2782 - protein, 15 aa, synthetic construct
WPRAAGARGGGRRRC

SEQ ID NO: 2783 - protein, 15 aa, synthetic construct
WRRAARLARPSSTAT

SEQ ID NO: 2784 - protein, 15 aa, synthetic construct
WRRAARRAARAPAPP

SEQ ID NO: 2785 - protein, 15 aa, synthetic construct
WRRARAARVLAPSRR

SEQ ID NO: 2786 - protein, 15 aa, synthetic construct
WTAARSAARGPSACP

SEQ ID NO: 2787 - protein, 15 aa, synthetic construct
AAAAAAAAAAAAAAD

SEQ ID NO: 2788 - protein, 15 aa, synthetic construct
AAATARAAAPAPRAR

SEQ ID NO: 2789 - protein, 15 aa, synthetic construct
AEGAHGAQVQGAATG

SEQ ID NO: 2790 - protein, 15 aa, synthetic construct
AFTRLTSTWPRRRGF

SEQ ID NO: 2791 - protein, 15 aa, synthetic construct
APRSPVAGPSPVGGS

SEQ ID NO: 2792 - protein, 15 aa, synthetic construct
AQDGHGVLGWRRGGP

SEQ ID NO: 2793 - protein, 15 aa, synthetic construct
CTATGATSAATTSTT

SEQ ID NO: 2794 - protein, 15 aa, synthetic construct
DSGSQTAIRRACPAE

SEQ ID NO: 2795 - protein, 15 aa, synthetic construct
EAAAGAGVRKGVHSA

SEQ ID NO: 2796 - protein, 15 aa, synthetic construct
EAADGPHAGGPPPAL

SEQ ID NO: 2797 - protein, 15 aa, synthetic construct
EAAGMRTPGRPCLQR

SEQ ID NO: 2798 - protein, 15 aa, synthetic construct
EAARGAGQPRGRRGR

SEQ ID NO: 2799 - protein, 15 aa, synthetic construct
EAEPLPRPTAAAAAR

SEQ ID NO: 2800 - protein, 15 aa, synthetic construct
EAGAAGAGAGAGAGA

SEQ ID NO: 2801 - protein, 15 aa, synthetic construct
EAGGLGAAPRRGQGE

SEQ ID NO: 2802 - protein, 15 aa, synthetic construct
EAGIEQGRAWERKRG

SEQ ID NO: 2803 - protein, 15 aa, synthetic construct
EAGPGAHVFPAPPAS

SEQ ID NO: 2804 - protein, 15 aa, synthetic construct
EAGPPRHRHLVQGHG

SEQ ID NO: 2805 - protein, 15 aa, synthetic construct
EAGVRPVPPLAGALA

SEQ ID NO: 2806 - protein, 15 aa, synthetic construct
EALGLRAAENAVCVC

SEQ ID NO: 2807 - protein, 15 aa, synthetic construct
EALPLPPTHHQPPGY

SEQ ID NO: 2808 - protein, 15 aa, synthetic construct
EALQPGAGAGPAPEC

SEQ ID NO: 2809 - protein, 15 aa, synthetic construct
EALTQPGARLLPTGG

SEQ ID NO: 2810 - protein, 15 aa, synthetic construct
EALVSVNRDIDNSWG

SEQ ID NO: 2811 - protein, 15 aa, synthetic construct
EAPAAGRRCPAGAVA

SEQ ID NO: 2812 - protein, 15 aa, synthetic construct
EAPGACYRVRGAVTG

SEQ ID NO: 2813 - protein, 15 aa, synthetic construct
EAPKGKTTLGSLPLP

SEQ ID NO: 2814 - protein, 15 aa, synthetic construct
EAPSSAFDCYSAPGP

SEQ ID NO: 2815 - protein, 15 aa, synthetic construct
EAQQSLRGAVPRLGA

SEQ ID NO: 2816 - protein, 15 aa, synthetic construct
EARAPEPAGQGRASP

SEQ ID NO: 2817 - protein, 15 aa, synthetic construct
EASGAAPERQRRDAR

SEQ ID NO: 2818 - protein, 15 aa, synthetic construct
EAVVPEREGENHGCP

SEQ ID NO: 2819 - protein, 15 aa, synthetic construct
EDFGAQLCASPSRNL

SEQ ID NO: 2820 - protein, 15 aa, synthetic construct
EEALGPGGPAQRLQQ

SEQ ID NO: 2821 - protein, 15 aa, synthetic construct
EEGPGTTACCGIWTC

SEQ ID NO: 2822 - protein, 15 aa, synthetic construct
EEPGAAGRAGSPGRK

SEQ ID NO: 2823 - protein, 15 aa, synthetic construct
EEPRSPAGCFSFPGI

SEQ ID NO: 2824 - protein, 15 aa, synthetic construct
EESSNPTVAVRGSLL

SEQ ID NO: 2825 - protein, 15 aa, synthetic construct
EGAAPGQRFLGDPWP

SEQ ID NO: 2826 - protein, 15 aa, synthetic construct
EGFLHHCDGHGAAVW

SEQ ID NO: 2827 - protein, 15 aa, synthetic construct
EGGAAAAAPASRPLF

SEQ ID NO: 2828 - protein, 15 aa, synthetic construct
EGGAARAQRPPGALH

SEQ ID NO: 2829 - protein, 15 aa, synthetic construct
EGPVGAGPLLRPADL

SEQ ID NO: 2830 - protein, 15 aa, synthetic construct
EGQGGEGGRRTAGRW

SEQ ID NO: 2831 - protein, 15 aa, synthetic construct
EGRPRAPEHAGGGHH

SEQ ID NO: 2832 - protein, 15 aa, synthetic construct
EGSHCSGACPPFCYG

SEQ ID NO: 2833 - protein, 15 aa, synthetic construct
EGSRALPAPVPPHPP

SEQ ID NO: 2834 - protein, 15 aa, synthetic construct
EGVGAALLGSSAGSW

SEQ ID NO: 2835 - protein, 15 aa, synthetic construct
EKATPVQKGSILSLQ

SEQ ID NO: 2836 - protein, 15 aa, synthetic construct
EKEADGAGHLQQTLR

SEQ ID NO: 2837 - protein, 15 aa, synthetic construct
EKHEAERGGVTRTQP

SEQ ID NO: 2838 - protein, 15 aa, synthetic construct
EKPYRNNRVYSSGIN

SEQ ID NO: 2839 - protein, 15 aa, synthetic construct
ELADGRSLPVLDPCF

SEQ ID NO: 2840 - protein, 15 aa, synthetic construct
ELAFSPDQERLLLRG

SEQ ID NO: 2841 - protein, 15 aa, synthetic construct
ELAGHRRAVGHLHHL

SEQ ID NO: 2842 - protein, 15 aa, synthetic construct
ELALQEEKQRQIQPH

SEQ ID NO: 2843 - protein, 15 aa, synthetic construct
ELAMAVGMAVGLAPI

SEQ ID NO: 2844 - protein, 15 aa, synthetic construct
ELASVPGPQSRLGRL

SEQ ID NO: 2845 - protein, 15 aa, synthetic construct
ELCGGDVSPPALWSV

SEQ ID NO: 2846 - protein, 15 aa, synthetic construct
ELGEGGPLPVTAAQL

SEQ ID NO: 2847 - protein, 15 aa, synthetic construct
ELGGRAARPPGQHLP

SEQ ID NO: 2848 - protein, 15 aa, synthetic construct
ELGSTSPGGPESEIP

SEQ ID NO: 2849 - protein, 15 aa, synthetic construct
ELHHREDPDRRQDAA

SEQ ID NO: 2850 - protein, 15 aa, synthetic construct
ELPDSSELFHRRGGS

SEQ ID NO: 2851 - protein, 15 aa, synthetic construct
ELQEAGRVRLREPGA

SEQ ID NO: 2852 - protein, 15 aa, synthetic construct
ELQREPAAANPSEPP

SEQ ID NO: 2853 - protein, 15 aa, synthetic construct
ELQRRLPPADQHSGP

SEQ ID NO: 2854 - protein, 15 aa, synthetic construct
ELQTREFPLYKVTLQ

SEQ ID NO: 2855 - protein, 15 aa, synthetic construct
ELRPAGDEEPGRRSY

SEQ ID NO: 2856 - protein, 15 aa, synthetic construct
ELRSPRPERSSSSPQ

SEQ ID NO: 2857 - protein, 15 aa, synthetic construct
ELSPRPRRVPQPAPA

SEQ ID NO: 2858 - protein, 15 aa, synthetic construct
ELSRGRPLGVVAGAQ

SEQ ID NO: 2859 - protein, 15 aa, synthetic construct
ELSTEKTPSLGSRIP

SEQ ID NO: 2860 - protein, 15 aa, synthetic construct
ELVGRGPGGATGGHD

SEQ ID NO: 2861 - protein, 15 aa, synthetic construct
ELVLAPPEFNSLLLC

SEQ ID NO: 2862 - protein, 15 aa, synthetic construct
ELWRAAAGGEGHQPG

SEQ ID NO: 2863 - protein, 15 aa, synthetic construct
EPARFPQIRQLLPYS

SEQ ID NO: 2864 - protein, 15 aa, synthetic construct
EPEDNPRAPHSGRHH

SEQ ID NO: 2865 - protein, 15 aa, synthetic construct
EPEPGPPGWRGGGGC

SEQ ID NO: 2866 - protein, 15 aa, synthetic construct
EPEPGVRAPEGQFSP

SEQ ID NO: 2867 - protein, 15 aa, synthetic construct
EPESAALPGPPLSQP

SEQ ID NO: 2868 - protein, 15 aa, synthetic construct
EPFAVLCPPCPGQLC

SEQ ID NO: 2869 - protein, 15 aa, synthetic construct
EPGEPFLWLVRCRAE

SEQ ID NO: 2870 - protein, 15 aa, synthetic construct
EPGHGLQGLLFLPAG

SEQ ID NO: 2871 - protein, 15 aa, synthetic construct
EPGLLVQPARVLLPP

SEQ ID NO: 2872 - protein, 15 aa, synthetic construct
EPGVGARAAGGRRPA

SEQ ID NO: 2873 - protein, 15 aa, synthetic construct
EPHCANLLSCQQRPA

SEQ ID NO: 2874 - protein, 15 aa, synthetic construct
EPHPRRTQRRAPAGG

SEQ ID NO: 2875 - protein, 15 aa, synthetic construct
EPHRAAPGFSPPHAE

SEQ ID NO: 2876 - protein, 15 aa, synthetic construct
EPHVREPAVHRGQHA

SEQ ID NO: 2877 - protein, 15 aa, synthetic construct
EPLGGQVSALLLGTA

SEQ ID NO: 2878 - protein, 15 aa, synthetic construct
EPLQPGGCPEHLFQC

SEQ ID NO: 2879 - protein, 15 aa, synthetic construct
EPLQWALQGVLGAPL

SEQ ID NO: 2880 - protein, 15 aa, synthetic construct
EPLRLQARALRAACA

SEQ ID NO: 2881 - protein, 15 aa, synthetic construct
EPLWAEDGRRASAAA

SEQ ID NO: 2882 - protein, 15 aa, synthetic construct
EPMPPQVPEPAGAGS

SEQ ID NO: 2883 - protein, 15 aa, synthetic construct
EPPAAAAAAESGRAA

SEQ ID NO: 2884 - protein, 15 aa, synthetic construct
EPPAAKRRRRSRDWS

SEQ ID NO: 2885 - protein, 15 aa, synthetic construct
EPPARPAPAPTPGPP

SEQ ID NO: 2886 - protein, 15 aa, synthetic construct
EPPGESSQPRYSRLC

SEQ ID NO: 2887 - protein, 15 aa, synthetic construct
EPPGPRWRRRQPAFE

SEQ ID NO: 2888 - protein, 15 aa, synthetic construct
EPPPAELLCQLWRWF

SEQ ID NO: 2889 - protein, 15 aa, synthetic construct
EPPPQPQLRDPGHGQ

SEQ ID NO: 2890 - protein, 15 aa, synthetic construct
EPPPRLQRPRQHGSS

SEQ ID NO: 2891 - protein, 15 aa, synthetic construct
EPPPVGPPGRLQLHL

SEQ ID NO: 2892 - protein, 15 aa, synthetic construct
EPPRELPEKDQQRWL

SEQ ID NO: 2893 - protein, 15 aa, synthetic construct
EPPRGRRRGPGRGGR

SEQ ID NO: 2894 - protein, 15 aa, synthetic construct
EPPVPIQTPGAGRPE

SEQ ID NO: 2895 - protein, 15 aa, synthetic construct
EPPVQPRGPCPGSFG

SEQ ID NO: 2896 - protein, 15 aa, synthetic construct
EPPVQPRGPCPRSFE

SEQ ID NO: 2897 - protein, 15 aa, synthetic construct
EPPVRPLRKSRVSHR

SEQ ID NO: 2898 - protein, 15 aa, synthetic construct
EPQPPARGGQRLPGH

SEQ ID NO: 2899 - protein, 15 aa, synthetic construct
EPRAGPAAAAAPVSW

SEQ ID NO: 2900 - protein, 15 aa, synthetic construct
EPRCWRSWRCWSPRR

SEQ ID NO: 2901 - protein, 15 aa, synthetic construct
EPRECYCSLHFREPP

SEQ ID NO: 2902 - protein, 15 aa, synthetic construct
EPRLRFVPPEPAGGL

SEQ ID NO: 2903 - protein, 15 aa, synthetic construct
EPRPPLPPTEAGAAL

SEQ ID NO: 2904 - protein, 15 aa, synthetic construct
EPRPSSAAPSRGQAP

SEQ ID NO: 2905 - protein, 15 aa, synthetic construct
EPRRGQWGLHSCVRN

SEQ ID NO: 2906 - protein, 15 aa, synthetic construct
EPRVVRAVLRPAHPR

SEQ ID NO: 2907 - protein, 15 aa, synthetic construct
EPRYSLGLRAAQGES

SEQ ID NO: 2908 - protein, 15 aa, synthetic construct
EPTALAYLPLHHWPT

SEQ ID NO: 2909 - protein, 15 aa, synthetic construct
EPTRSRWCCWGKAAW

SEQ ID NO: 2910 - protein, 15 aa, synthetic construct
EPVKAPGQNPEASGR

SEQ ID NO: 2911 - protein, 15 aa, synthetic construct
EPVRGSCRRRAAGLR

SEQ ID NO: 2912 - protein, 15 aa, synthetic construct
EPWGAEGLPALFLPE

SEQ ID NO: 2913 - protein, 15 aa, synthetic construct
EPWLLAGGAAGRDRA

SEQ ID NO: 2914 - protein, 15 aa, synthetic construct
ERAAAAAAHGCPSRC

SEQ ID NO: 2915 - protein, 15 aa, synthetic construct
ERAADHGSDRRAARG

SEQ ID NO: 2916 - protein, 15 aa, synthetic construct
ERAAGGRAGLHVSEP

SEQ ID NO: 2917 - protein, 15 aa, synthetic construct
ERAAPLPVALSAGPA

SEQ ID NO: 2918 - protein, 15 aa, synthetic construct
ERAAQGGLGTLGQRS

SEQ ID NO: 2919 - protein, 15 aa, synthetic construct
ERAEPPCARRGVGAA

SEQ ID NO: 2920 - protein, 15 aa, synthetic construct
ERAESPPPTAGPPQN

SEQ ID NO: 2921 - protein, 15 aa, synthetic construct
ERAGAGSPTDDGGRR

SEQ ID NO: 2922 - protein, 15 aa, synthetic construct
ERAGGRRSGLQKKIP

SEQ ID NO: 2923 - protein, 15 aa, synthetic construct
ERAGPVFLHTKPGAG

SEQ ID NO: 2924 - protein, 15 aa, synthetic construct
ERAGSGPRRPRVPAS

SEQ ID NO: 2925 - protein, 15 aa, synthetic construct
ERAHPAAAVRVGPRQ

SEQ ID NO: 2926 - protein, 15 aa, synthetic construct
ERDDFSAHLQRNLGA

SEQ ID NO: 2927 - protein, 15 aa, synthetic construct
ERDKPVECLRVPPPG

SEQ ID NO: 2928 - protein, 15 aa, synthetic construct
ERDPQRGKPSKGIQT

SEQ ID NO: 2929 - protein, 15 aa, synthetic construct
ERGAPGGLQQQRLRG

SEQ ID NO: 2930 - protein, 15 aa, synthetic construct
ERHTEDPPPGLLPPL

SEQ ID NO: 2931 - protein, 15 aa, synthetic construct
ERQGRGRAGPRADRA

SEQ ID NO: 2932 - protein, 15 aa, synthetic construct
ERQSRRSEPQAEGGI

SEQ ID NO: 2933 - protein, 15 aa, synthetic construct
ERSVPAVADDDAAPA

SEQ ID NO: 2934 - protein, 15 aa, synthetic construct
ERTPRKPKRWPPANT

SEQ ID NO: 2935 - protein, 15 aa, synthetic construct
ERVCVGPKRFTPVGR

SEQ ID NO: 2936 - protein, 15 aa, synthetic construct
ERVPGPCRRPGGWHR

SEQ ID NO: 2937 - protein, 15 aa, synthetic construct
ERVPNPRRPEPPPGH

SEQ ID NO: 2938 - protein, 15 aa, synthetic construct
ERVPRPSCGGSAPLG

SEQ ID NO: 2939 - protein, 15 aa, synthetic construct
ERVPSVPAAAGGGGR

SEQ ID NO: 2940 - protein, 15 aa, synthetic construct
ERVQRQCAPARQAQP

SEQ ID NO: 2941 - protein, 15 aa, synthetic construct
ERWAEEQRERGAECG

SEQ ID NO: 2942 - protein, 15 aa, synthetic construct
FPGCSSVAAEDINRV

SEQ ID NO: 2943 - protein, 15 aa, synthetic construct
FPLPQARYGLAQAPI

SEQ ID NO: 2944 - protein, 15 aa, synthetic construct
GASQPRSRTSRPPPS

SEQ ID NO: 2945 - protein, 15 aa, synthetic construct
GLPPAKPAEASEPLR

SEQ ID NO: 2946 - protein, 15 aa, synthetic construct
GLPPHCQHRGQEAVP

SEQ ID NO: 2947 - protein, 15 aa, synthetic construct
GLPPPHSPGAHHGDA

SEQ ID NO: 2948 - protein, 15 aa, synthetic construct
GPAPHRPAARAAAVA

SEQ ID NO: 2949 - protein, 15 aa, synthetic construct
GPAPPRELRALGLVR

SEQ ID NO: 2950 - protein, 15 aa, synthetic construct
GPAPRLRRPLVAAAA

SEQ ID NO: 2951 - protein, 15 aa, synthetic construct
GPAPRPRRLLGGLRR

SEQ ID NO: 2952 - protein, 15 aa, synthetic construct
GPAPSPGPKRGGIRV

SEQ ID NO: 2953 - protein, 15 aa, synthetic construct
GPAPSPSSTSSPACP

SEQ ID NO: 2954 - protein, 15 aa, synthetic construct
GPPPPPTPPRARGAR

SEQ ID NO: 2955 - protein, 15 aa, synthetic construct
GPSAPRPPRGRCRLL

SEQ ID NO: 2956 - protein, 15 aa, synthetic construct
GSVRDGGARAGEGAA

SEQ ID NO: 2957 - protein, 15 aa, synthetic construct
GVHREQIYRGICRWE

SEQ ID NO: 2958 - protein, 15 aa, synthetic construct
IAEQNPGFRRVVVYK

SEQ ID NO: 2959 - protein, 15 aa, synthetic construct
IAGGERARAAGCGAA

SEQ ID NO: 2960 - protein, 15 aa, synthetic construct
IEHQPAERGRGRRRR

SEQ ID NO: 2961 - protein, 15 aa, synthetic construct
ILEALPGRARHGHPP

SEQ ID NO: 2962 - protein, 15 aa, synthetic construct
ISGGTSSTTSTRSGS

SEQ ID NO: 2963 - protein, 15 aa, synthetic construct
ISGPPFEIGSAPAGV

SEQ ID NO: 2964 - protein, 15 aa, synthetic construct
ISQCEQQLPTFRRIR

SEQ ID NO: 2965 - protein, 15 aa, synthetic construct
ITGGSFPTLSTIAGS

SEQ ID NO: 2966 - protein, 15 aa, synthetic construct
LCRRPRAARSSRGTG

SEQ ID NO: 2967 - protein, 15 aa, synthetic construct
PASVWSDCSSGGLGY

SEQ ID NO: 2968 - protein, 15 aa, synthetic construct
RAAGAGRGASGRGLG

SEQ ID NO: 2969 - protein, 15 aa, synthetic construct
RMCGWRPIFPGSLMA

SEQ ID NO: 2970 - protein, 15 aa, synthetic construct
RQRPAGIRGRPVPSA

SEQ ID NO: 2971 - protein, 15 aa, synthetic construct
SAKGPRFAGGLGVCC

SEQ ID NO: 2972 - protein, 15 aa, synthetic construct
SAKWVHDRPAASAAA

SEQ ID NO: 2973 - protein, 15 aa, synthetic construct
SPPRATSRTARGAAR

SEQ ID NO: 2974 - protein, 15 aa, synthetic construct
SPRSPTGASSSASAC

SEQ ID NO: 2975 - protein, 15 aa, synthetic construct
SPRSSSFLSRPRCCT

SEQ ID NO: 2976 - protein, 15 aa, synthetic construct
SSKRMGWKAPRKGRR

SEQ ID NO: 2977 - protein, 15 aa, synthetic construct
SSPRPRAAPPAVCGS

SEQ ID NO: 2978 - protein, 15 aa, synthetic construct
STKPSSPATCSRSKP

SEQ ID NO: 2979 - protein, 15 aa, synthetic construct
STKRWTTGSTASTRA

SEQ ID NO: 2980 - protein, 15 aa, synthetic construct
VAAAAAAAAGGPRDA

SEQ ID NO: 2981 - protein, 15 aa, synthetic construct
VAAAAAGTVPAAKAR

SEQ ID NO: 2982 - protein, 15 aa, synthetic construct
VAAAAGRARRCCSAA

SEQ ID NO: 2983 - protein, 15 aa, synthetic construct
VAAAARRGQGGARGR

SEQ ID NO: 2984 - protein, 15 aa, synthetic construct
VAAAATWPCGLPAAI

SEQ ID NO: 2985 - protein, 15 aa, synthetic construct
VAAALAWRGLRQRTP

SEQ ID NO: 2986 - protein, 15 aa, synthetic construct
VAAALRTGAGRGAQL

SEQ ID NO: 2987 - protein, 15 aa, synthetic construct
VAAAVAARVSGRADR

SEQ ID NO: 2988 - protein, 15 aa, synthetic construct
VAAAVAVAAAVAAVD

SEQ ID NO: 2989 - protein, 15 aa, synthetic construct
VAAAVGARLLGGSRL

SEQ ID NO: 2990 - protein, 15 aa, synthetic construct
VAAAVRFAVCFIISC

SEQ ID NO: 2991 - protein, 15 aa, synthetic construct
VAAGPWLSTKFCTQP

SEQ ID NO: 2992 - protein, 15 aa, synthetic construct
VAAPAPAAAQAPPGR

SEQ ID NO: 2993 - protein, 15 aa, synthetic construct
VAAQTALAPRALALG

SEQ ID NO: 2994 - protein, 15 aa, synthetic construct
VAARPHRHVLLPKRH

SEQ ID NO: 2995 - protein, 15 aa, synthetic construct
VAARRPAVDVVAQEP

SEQ ID NO: 2996 - protein, 15 aa, synthetic construct
VAATRMGAWAAELSR

SEQ ID NO: 2997 - protein, 15 aa, synthetic construct
VACQARGGRGLAVPA

SEQ ID NO: 2998 - protein, 15 aa, synthetic construct
VACSRPCAGRSRSCR

SEQ ID NO: 2999 - protein, 15 aa, synthetic construct
VACWIGSFWSPCASN

SEQ ID NO: 3000 - protein, 15 aa, synthetic construct
VADTREQGAPGPAGR

SEQ ID NO: 3001 - protein, 15 aa, synthetic construct
VAEAFFLAPLFPGPV

SEQ ID NO: 3002 - protein, 15 aa, synthetic construct
VAFRSHGEPAPAAVP

SEQ ID NO: 3003 - protein, 15 aa, synthetic construct
VAGGRARGQGHLRPR

SEQ ID NO: 3004 - protein, 15 aa, synthetic construct
VAGLRSGAASGQDDE

SEQ ID NO: 3005 - protein, 15 aa, synthetic construct
VAGRAGGGGVRGRRR

SEQ ID NO: 3006 - protein, 15 aa, synthetic construct
VAGRARLRPAAGAGR

SEQ ID NO: 3007 - protein, 15 aa, synthetic construct
VAGRHRARRLLQPHL

SEQ ID NO: 3008 - protein, 15 aa, synthetic construct
VAGRRGHQAALSPRL

SEQ ID NO: 3009 - protein, 15 aa, synthetic construct
VAGSCRPLPRSPPAL

SEQ ID NO: 3010 - protein, 15 aa, synthetic construct
VAGTRKCRKRGVGNS

SEQ ID NO: 3011 - protein, 15 aa, synthetic construct
VAGWASLLAQPCHSG

SEQ ID NO: 3012 - protein, 15 aa, synthetic construct
VAHHQVPRRCRPQNG

SEQ ID NO: 3013 - protein, 15 aa, synthetic construct
VAHQRAALRLARLGR

SEQ ID NO: 3014 - protein, 15 aa, synthetic construct
VAHRRRHLAAAPHLQ

SEQ ID NO: 3015 - protein, 15 aa, synthetic construct
VAHVRSARSRAGVAQ

SEQ ID NO: 3016 - protein, 15 aa, synthetic construct
VAKASRCGPRSTTQE

SEQ ID NO: 3017 - protein, 15 aa, synthetic construct
VALAAGLRAAHRGLP

SEQ ID NO: 3018 - protein, 15 aa, synthetic construct
VALAVGAVAPAVEAV

SEQ ID NO: 3019 - protein, 15 aa, synthetic construct
VALGAAALQLALHLQ

SEQ ID NO: 3020 - protein, 15 aa, synthetic construct
VALGCSLDARAAEQR

SEQ ID NO: 3021 - protein, 15 aa, synthetic construct
VALIQCNPNLMGIHC

SEQ ID NO: 3022 - protein, 15 aa, synthetic construct
VALLRDHWIADGSPL

SEQ ID NO: 3023 - protein, 15 aa, synthetic construct
VALPGGFRGPVLPSA

SEQ ID NO: 3024 - protein, 15 aa, synthetic construct
VALQPAAATGHRRDR

SEQ ID NO: 3025 - protein, 15 aa, synthetic construct
VALRAWDAGAVPGPQ

SEQ ID NO: 3026 - protein, 15 aa, synthetic construct
VALSAAAQSAEAGGE

SEQ ID NO: 3027 - protein, 15 aa, synthetic construct
VALVPRWPPVPGRAS

SEQ ID NO: 3028 - protein, 15 aa, synthetic construct
VALVPRWPSVPGRAS

SEQ ID NO: 3029 - protein, 15 aa, synthetic construct
VAPAAAVPPGPVPGD

SEQ ID NO: 3030 - protein, 15 aa, synthetic construct
VAPAAVCPSAAASPC

SEQ ID NO: 3031 - protein, 15 aa, synthetic construct
VAPAAVHPSTAASPC

SEQ ID NO: 3032 - protein, 15 aa, synthetic construct
VAPAAVYLSAAASPC

SEQ ID NO: 3033 - protein, 15 aa, synthetic construct
VAPAGAARAHRAVGA

SEQ ID NO: 3034 - protein, 15 aa, synthetic construct
VAPAVGAVALAVGAA

SEQ ID NO: 3035 - protein, 15 aa, synthetic construct
VAPCLYPGHSLCFRG

SEQ ID NO: 3036 - protein, 15 aa, synthetic construct
VAPGACAGPRGPGQE

SEQ ID NO: 3037 - protein, 15 aa, synthetic construct
VAPGAVSGGAGGGST

SEQ ID NO: 3038 - protein, 15 aa, synthetic construct
VAPGPSDRLPDLGLV

SEQ ID NO: 3039 - protein, 15 aa, synthetic construct
VAPGQCNSNLTDILC

SEQ ID NO: 3040 - protein, 15 aa, synthetic construct
VAPHRPPCYLRQQCH

SEQ ID NO: 3041 - protein, 15 aa, synthetic construct
VAPPGSPQVPLPHAL

SEQ ID NO: 3042 - protein, 15 aa, synthetic construct
VAPPLLAFSRHRKAP

SEQ ID NO: 3043 - protein, 15 aa, synthetic construct
VAPPPPPPRRPAPSP

SEQ ID NO: 3044 - protein, 15 aa, synthetic construct
VAPRGCGRSLGAVDS

SEQ ID NO: 3045 - protein, 15 aa, synthetic construct
VAPTLPPSPPHDVRR

SEQ ID NO: 3046 - protein, 15 aa, synthetic construct
VAPTPAASDSMLRGP

SEQ ID NO: 3047 - protein, 15 aa, synthetic construct
VAPTPLPSPPRDVRK

SEQ ID NO: 3048 - protein, 15 aa, synthetic construct
VAPTPPPSPPHDVRK

SEQ ID NO: 3049 - protein, 15 aa, synthetic construct
VAPTPPPSPPRDVGR

SEQ ID NO: 3050 - protein, 15 aa, synthetic construct
VAPTPPPSPPRDVRK

SEQ ID NO: 3051 - protein, 15 aa, synthetic construct
VAPVALLGTLGAAPG

SEQ ID NO: 3052 - protein, 15 aa, synthetic construct
VAPVFVPRDNLRRVS

SEQ ID NO: 3053 - protein, 15 aa, synthetic construct
VAPVGAPKEAVALVA

SEQ ID NO: 3054 - protein, 15 aa, synthetic construct
VAPVGAPRGAVSPVG

SEQ ID NO: 3055 - protein, 15 aa, synthetic construct
VAQRRADSACVRGHA

SEQ ID NO: 3056 - protein, 15 aa, synthetic construct
VAQTNLLFGQIRRRG

SEQ ID NO: 3057 - protein, 15 aa, synthetic construct
VAQWNRSSATPAGVR

SEQ ID NO: 3058 - protein, 15 aa, synthetic construct
VARAGSGSEAGSEPR

SEQ ID NO: 3059 - protein, 15 aa, synthetic construct
VARAPGRRQRPAEER

SEQ ID NO: 3060 - protein, 15 aa, synthetic construct
VARGQPRSPGKPGAA

SEQ ID NO: 3061 - protein, 15 aa, synthetic construct
VASPGLLLLGSGARF

SEQ ID NO: 3062 - protein, 15 aa, synthetic construct
VASPRPRLGPVAAPR

SEQ ID NO: 3063 - protein, 15 aa, synthetic construct
VASWSHSCRRSAACY

SEQ ID NO: 3064 - protein, 15 aa, synthetic construct
VATFSWGQALGQHFN

SEQ ID NO: 3065 - protein, 15 aa, synthetic construct
VATKAALWFDRKRSG

SEQ ID NO: 3066 - protein, 15 aa, synthetic construct
VAVLLRLPHLAQRPG

SEQ ID NO: 3067 - protein, 15 aa, synthetic construct
VAVPHPGSVRWAPAA

SEQ ID NO: 3068 - protein, 15 aa, synthetic construct
VAWTGAGASDWLRGP

SEQ ID NO: 3069 - protein, 15 aa, synthetic construct
VCAVLLHHEVQAVRS

SEQ ID NO: 3070 - protein, 15 aa, synthetic construct
VCAVRGPRRPRQSRP

SEQ ID NO: 3071 - protein, 15 aa, synthetic construct
VCCCFLHLVFDDLSA

SEQ ID NO: 3072 - protein, 15 aa, synthetic construct
VCLHPRLVETPLVPG

SEQ ID NO: 3073 - protein, 15 aa, synthetic construct
VCPAAADPSAASLCA

SEQ ID NO: 3074 - protein, 15 aa, synthetic construct
VCPAESVFCAAPGGP

SEQ ID NO: 3075 - protein, 15 aa, synthetic construct
VCPGGLRVPGAASPG

SEQ ID NO: 3076 - protein, 15 aa, synthetic construct
VCPLPRRCPAAAASV

SEQ ID NO: 3077 - protein, 15 aa, synthetic construct
VCPRSHRGPAGVGGL

SEQ ID NO: 3078 - protein, 15 aa, synthetic construct
VCQRQRLGGALGWAG

SEQ ID NO: 3079 - protein, 15 aa, synthetic construct
VCRAAGPVHDPGFGV

SEQ ID NO: 3080 - protein, 15 aa, synthetic construct
VCRASPQGQAGSVPL

SEQ ID NO: 3081 - protein, 15 aa, synthetic construct
VCRNTDPRQRQDGHC

SEQ ID NO: 3082 - protein, 15 aa, synthetic construct
VCRSDAAPGAHLPRD

SEQ ID NO: 3083 - protein, 15 aa, synthetic construct
VCSIQLKQALLFLPQ

SEQ ID NO: 3084 - protein, 15 aa, synthetic construct
VCSPPWNWPSSRSAT

SEQ ID NO: 3085 - protein, 15 aa, synthetic construct
VCTPKEIWGRLSGSD

SEQ ID NO: 3086 - protein, 15 aa, synthetic construct
VCTRGDACFSQEQDS

SEQ ID NO: 3087 - protein, 15 aa, synthetic construct
VCTSPPGPPSEREGA

SEQ ID NO: 3088 - protein, 15 aa, synthetic construct
VCTWDSCLFRRVGRS

SEQ ID NO: 3089 - protein, 15 aa, synthetic construct
VCWGKRPQPTGGAWR

SEQ ID NO: 3090 - protein, 15 aa, synthetic construct
VDDAQKKQDGSRRGS

SEQ ID NO: 3091 - protein, 15 aa, synthetic construct
VDFRHPAVGHAGAAE

SEQ ID NO: 3092 - protein, 15 aa, synthetic construct
VDFRMARCEINDVGT

SEQ ID NO: 3093 - protein, 15 aa, synthetic construct
VDHTSVRLLRCRLLV

SEQ ID NO: 3094 - protein, 15 aa, synthetic construct
VDLHPHQPDPPNQCG

SEQ ID NO: 3095 - protein, 15 aa, synthetic construct
VDLRVWDSGIRSFMD

SEQ ID NO: 3096 - protein, 15 aa, synthetic construct
VDPRAARGSLAGNPA

SEQ ID NO: 3097 - protein, 15 aa, synthetic construct
VDRGSRGDRRGPGIR

SEQ ID NO: 3098 - protein, 15 aa, synthetic construct
VDRHEFRDQELPAAA

SEQ ID NO: 3099 - protein, 15 aa, synthetic construct
VDSRAPRSSRPPGVT

SEQ ID NO: 3100 - protein, 15 aa, synthetic construct
VDSTKSRESGASLFP

SEQ ID NO: 3101 - protein, 15 aa, synthetic construct
VDVSRLPPPPPRRRP

SEQ ID NO: 3102 - protein, 15 aa, synthetic construct
VEAPRRPRRASGDPD

SEQ ID NO: 3103 - protein, 15 aa, synthetic construct
VEGVAVTRPPPPPPR

SEQ ID NO: 3104 - protein, 15 aa, synthetic construct
VEPYLCFVGCWISLI

SEQ ID NO: 3105 - protein, 15 aa, synthetic construct
VEQARPRRQQSSPAS

SEQ ID NO: 3106 - protein, 15 aa, synthetic construct
VERDAQRRAGVQPHT

SEQ ID NO: 3107 - protein, 15 aa, synthetic construct
VERPQLLHQLGGGRV

SEQ ID NO: 3108 - protein, 15 aa, synthetic construct
VERSYRAGLCSKAAL

SEQ ID NO: 3109 - protein, 15 aa, synthetic construct
VESPSRNRLGCGHRA

SEQ ID NO: 3110 - protein, 15 aa, synthetic construct
VETRRWRWRAGLGML

SEQ ID NO: 3111 - protein, 15 aa, synthetic construct
VEVRRPWAFVGPGCS

SEQ ID NO: 3112 - protein, 15 aa, synthetic construct
VFAGRRLSPGKMVAA

SEQ ID NO: 3113 - protein, 15 aa, synthetic construct
VFGAREAAATARRRR

SEQ ID NO: 3114 - protein, 15 aa, synthetic construct
VFGVHDNSNGKLPHH

SEQ ID NO: 3115 - protein, 15 aa, synthetic construct
VFHEDRLPGPKCGGH

SEQ ID NO: 3116 - protein, 15 aa, synthetic construct
VFLHMQSTFLASCTK

SEQ ID NO: 3117 - protein, 15 aa, synthetic construct
VFPDSHLGSHSLHFG

SEQ ID NO: 3118 - protein, 15 aa, synthetic construct
VFRPEEAGGVGPGPG

SEQ ID NO: 3119 - protein, 15 aa, synthetic construct
VFSERLAQEAAVPSG

SEQ ID NO: 3120 - protein, 15 aa, synthetic construct
VFSSLSPFYQESFCH

SEQ ID NO: 3121 - protein, 15 aa, synthetic construct
VGAAAQDRGRAEHHG

SEQ ID NO: 3122 - protein, 15 aa, synthetic construct
VGAAATSGAAAGWLL

SEQ ID NO: 3123 - protein, 15 aa, synthetic construct
VGAACQAPGGAARAW

SEQ ID NO: 3124 - protein, 15 aa, synthetic construct
VGAAELRSRGLLFSS

SEQ ID NO: 3125 - protein, 15 aa, synthetic construct
VGAAGLGRRGQPAAP

SEQ ID NO: 3126 - protein, 15 aa, synthetic construct
VGAAGPADPGGKRTP

SEQ ID NO: 3127 - protein, 15 aa, synthetic construct
VGAAGVGGLASSTAS

SEQ ID NO: 3128 - protein, 15 aa, synthetic construct
VGAAQRGGHGVPDHP

SEQ ID NO: 3129 - protein, 15 aa, synthetic construct
VGAARPVGSQGVADH

SEQ ID NO: 3130 - protein, 15 aa, synthetic construct
VGAASSAGARPRRRR

SEQ ID NO: 3131 - protein, 15 aa, synthetic construct
VGACLLASWAPFLVW

SEQ ID NO: 3132 - protein, 15 aa, synthetic construct
VGADATAALLELGRG

SEQ ID NO: 3133 - protein, 15 aa, synthetic construct
VGAERPARPALRRAV

SEQ ID NO: 3134 - protein, 15 aa, synthetic construct
VGAFDLDTASSASDP

SEQ ID NO: 3135 - protein, 15 aa, synthetic construct
VGAGCTPARGGRCTP

SEQ ID NO: 3136 - protein, 15 aa, synthetic construct
VGAGHRLPLSLLGRS

SEQ ID NO: 3137 - protein, 15 aa, synthetic construct
VGAGRVRATLRFHQL

SEQ ID NO: 3138 - protein, 15 aa, synthetic construct
VGAHLAAPEAAGARQ

SEQ ID NO: 3139 - protein, 15 aa, synthetic construct
VGAPARPGRLRAGRR

SEQ ID NO: 3140 - protein, 15 aa, synthetic construct
VGAPEGAGVRAHPPA

SEQ ID NO: 3141 - protein, 15 aa, synthetic construct
VGAPGRGGGAILCPG

SEQ ID NO: 3142 - protein, 15 aa, synthetic construct
VGAPLHSLLQGCVRR

SEQ ID NO: 3143 - protein, 15 aa, synthetic construct
VGAPRGAVAPVGVPR

SEQ ID NO: 3144 - protein, 15 aa, synthetic construct
VGAPRRGLRHPRAQP

SEQ ID NO: 3145 - protein, 15 aa, synthetic construct
VGAPVRTLAGEPAAV

SEQ ID NO: 3146 - protein, 15 aa, synthetic construct
VGARDGRGSAAPGGP

SEQ ID NO: 3147 - protein, 15 aa, synthetic construct
VGARGARSSGARAQR

SEQ ID NO: 3148 - protein, 15 aa, synthetic construct
VGARGSLAAYPSLFV

SEQ ID NO: 3149 - protein, 15 aa, synthetic construct
VGASPPSSPPQATVS

SEQ ID NO: 3150 - protein, 15 aa, synthetic construct
VGATERAQPHGQVGA

SEQ ID NO: 3151 - protein, 15 aa, synthetic construct
VGAVGGGGVRAAGDG

SEQ ID NO: 3152 - protein, 15 aa, synthetic construct
VGCAGPQHHRLPRGA

SEQ ID NO: 3153 - protein, 15 aa, synthetic construct
VGCGGRAVALPRGSP

SEQ ID NO: 3154 - protein, 15 aa, synthetic construct
VGCPKYEIWHLSFVV

SEQ ID NO: 3155 - protein, 15 aa, synthetic construct
VGCVGGRPQLRGAHC

SEQ ID NO: 3156 - protein, 15 aa, synthetic construct
VGDAGRRVQPEAHTT

SEQ ID NO: 3157 - protein, 15 aa, synthetic construct
VGDPSLQRPAPRRRR

SEQ ID NO: 3158 - protein, 15 aa, synthetic construct
VGDPVPVAQQGVEGV

SEQ ID NO: 3159 - protein, 15 aa, synthetic construct
VGDQTPASPAAAACP

SEQ ID NO: 3160 - protein, 15 aa, synthetic construct
VGELRGGAVAVRGQG

SEQ ID NO: 3161 - protein, 15 aa, synthetic construct
VGFSEFRPSICQGKP

SEQ ID NO: 3162 - protein, 15 aa, synthetic construct
VGFVAAQRPGPLAVA

SEQ ID NO: 3163 - protein, 15 aa, synthetic construct
VGGAAGVSWSKCPGL

SEQ ID NO: 3164 - protein, 15 aa, synthetic construct
VGGAALRRREAEPLR

SEQ ID NO: 3165 - protein, 15 aa, synthetic construct
VGGAGRLATGDSAGC

SEQ ID NO: 3166 - protein, 15 aa, synthetic construct
VGGAVRRGRGGGSGN

SEQ ID NO: 3167 - protein, 15 aa, synthetic construct
VGGDGQQRDGRRGQR

SEQ ID NO: 3168 - protein, 15 aa, synthetic construct
VGGGALGAYFSLFLR

SEQ ID NO: 3169 - protein, 15 aa, synthetic construct
VGGGGGRGLGLETRR

SEQ ID NO: 3170 - protein, 15 aa, synthetic construct
VGGGGRLCLAEGGLA

SEQ ID NO: 3171 - protein, 15 aa, synthetic construct
VGGGHRPGLPELLRR

SEQ ID NO: 3172 - protein, 15 aa, synthetic construct
VGGGLGPGCRRGPVP

SEQ ID NO: 3173 - protein, 15 aa, synthetic construct
VGGGPLRRCGQAQHP

SEQ ID NO: 3174 - protein, 15 aa, synthetic construct
VGGGSGRGRRGGLLQ

SEQ ID NO: 3175 - protein, 15 aa, synthetic construct
VGGPGRRGALRYRVG

SEQ ID NO: 3176 - protein, 15 aa, synthetic construct
VGGQQLLQLAVPSRE

SEQ ID NO: 3177 - protein, 15 aa, synthetic construct
VGGQVADWAALPSLA

SEQ ID NO: 3178 - protein, 15 aa, synthetic construct
VGGRSMPSSSRRGPR

SEQ ID NO: 3179 - protein, 15 aa, synthetic construct
VGGRWRWSRALPRRK

SEQ ID NO: 3180 - protein, 15 aa, synthetic construct
VGGWHRRGEGGSERA

SEQ ID NO: 3181 - protein, 15 aa, synthetic construct
VGHPAANPAAASPAA

SEQ ID NO: 3182 - protein, 15 aa, synthetic construct
VGHPAASPAAVSPAA

SEQ ID NO: 3183 - protein, 15 aa, synthetic construct
VGHVELYPGPQEAAG

SEQ ID NO: 3184 - protein, 15 aa, synthetic construct
VGIPGHGDHRPHVPD

SEQ ID NO: 3185 - protein, 15 aa, synthetic construct
VGKPDPGFRSNLSTH

SEQ ID NO: 3186 - protein, 15 aa, synthetic construct
VGKPQSSQGATPQLH

SEQ ID NO: 3187 - protein, 15 aa, synthetic construct
VGLCAASPHLYATQN

SEQ ID NO: 3188 - protein, 15 aa, synthetic construct
VGLGCCQPKQGRCPM

SEQ ID NO: 3189 - protein, 15 aa, synthetic construct
VGLHRQQHHHVAEHL

SEQ ID NO: 3190 - protein, 15 aa, synthetic construct
VGLLGIAHAAADQFD

SEQ ID NO: 3191 - protein, 15 aa, synthetic construct
VGLPDAASGRGPLGR

SEQ ID NO: 3192 - protein, 15 aa, synthetic construct
VGLPGGAARREAGDG

SEQ ID NO: 3193 - protein, 15 aa, synthetic construct
VGLREASDHRPYPEG

SEQ ID NO: 3194 - protein, 15 aa, synthetic construct
VGPDAIADGERAGHG

SEQ ID NO: 3195 - protein, 15 aa, synthetic construct
VGPGPDLPRSSLRVL

SEQ ID NO: 3196 - protein, 15 aa, synthetic construct
VGPGPVPAARPAALR

SEQ ID NO: 3197 - protein, 15 aa, synthetic construct
VGPGRAAPGVPDGAR

SEQ ID NO: 3198 - protein, 15 aa, synthetic construct
VGPKVSPVLVSLGAG

SEQ ID NO: 3199 - protein, 15 aa, synthetic construct
VGPPAPAGPRPQPRR

SEQ ID NO: 3200 - protein, 15 aa, synthetic construct
VGPPGRPARGARRPG

SEQ ID NO: 3201 - protein, 15 aa, synthetic construct
VGPRGQRAAGWDHFG

SEQ ID NO: 3202 - protein, 15 aa, synthetic construct
VGPRQDWRQGPRQGQ

SEQ ID NO: 3203 - protein, 15 aa, synthetic construct
VGPRRGRAAQPRRGH

SEQ ID NO: 3204 - protein, 15 aa, synthetic construct
VGQDLLNNHGHKAEH

SEQ ID NO: 3205 - protein, 15 aa, synthetic construct
VGQRSPGGCWGRRGG

SEQ ID NO: 3206 - protein, 15 aa, synthetic construct
VGRGGTAGRALPARH

SEQ ID NO: 3207 - protein, 15 aa, synthetic construct
VGRSGARIGAPPPHA

SEQ ID NO: 3208 - protein, 15 aa, synthetic construct
VGRTAPSGRLCRAPA

SEQ ID NO: 3209 - protein, 15 aa, synthetic construct
VGSAPLFPVPVRPRH

SEQ ID NO: 3210 - protein, 15 aa, synthetic construct
VGSAPSRNVGPITSH

SEQ ID NO: 3211 - protein, 15 aa, synthetic construct
VGSAQDHPLLRRLLA

SEQ ID NO: 3212 - protein, 15 aa, synthetic construct
VGSCRAPGPPGSHPG

SEQ ID NO: 3213 - protein, 15 aa, synthetic construct
VGSEAGEVGPVAASA

SEQ ID NO: 3214 - protein, 15 aa, synthetic construct
VGSQATLATRSPTQS

SEQ ID NO: 3215 - protein, 15 aa, synthetic construct
VGSQGEPVQEIPGQH

SEQ ID NO: 3216 - protein, 15 aa, synthetic construct
VGSTSSNHGGWAHQE

SEQ ID NO: 3217 - protein, 15 aa, synthetic construct
VGTLGSGDCGPGICS

SEQ ID NO: 3218 - protein, 15 aa, synthetic construct
VGTLLGPRSGGAQTS

SEQ ID NO: 3219 - protein, 15 aa, synthetic construct
VGTLQTIQTSSTTLC

SEQ ID NO: 3220 - protein, 15 aa, synthetic construct
VGTRGPGPRPGAAAG

SEQ ID NO: 3221 - protein, 15 aa, synthetic construct
VGTRQAGRQSSRQSQ

SEQ ID NO: 3222 - protein, 15 aa, synthetic construct
VGVAARRLRAVRPRS

SEQ ID NO: 3223 - protein, 15 aa, synthetic construct
VGVCGSGGRCSGLRG

SEQ ID NO: 3224 - protein, 15 aa, synthetic construct
VGVGSVCHFAVLRRV

SEQ ID NO: 3225 - protein, 15 aa, synthetic construct
VGVGTFPSWPLPGSL

SEQ ID NO: 3226 - protein, 15 aa, synthetic construct
VGWARGCARRSRGCR

SEQ ID NO: 3227 - protein, 15 aa, synthetic construct
VGWPPEGAAQRLLRG

SEQ ID NO: 3228 - protein, 15 aa, synthetic construct
VGWPWSGSHKHFWNS

SEQ ID NO: 3229 - protein, 15 aa, synthetic construct
VGYAAASEGLYPERR

SEQ ID NO: 3230 - protein, 15 aa, synthetic construct
VGYQGKSCRPGPAHE

SEQ ID NO: 3231 - protein, 15 aa, synthetic construct
VHAAHLRLHAGASGV

SEQ ID NO: 3232 - protein, 15 aa, synthetic construct
VHACTSLCDFSRYGR

SEQ ID NO: 3233 - protein, 15 aa, synthetic construct
VHAQEDRGDPRADPE

SEQ ID NO: 3234 - protein, 15 aa, synthetic construct
VHASSPTALPPCLFT

SEQ ID NO: 3235 - protein, 15 aa, synthetic construct
VHEREHHDLHDSGGV

SEQ ID NO: 3236 - protein, 15 aa, synthetic construct
VHGDRSGPPALPALA

SEQ ID NO: 3237 - protein, 15 aa, synthetic construct
VHGEAAGLPPGAADV

SEQ ID NO: 3238 - protein, 15 aa, synthetic construct
VHGGARERHGRPRGA

SEQ ID NO: 3239 - protein, 15 aa, synthetic construct
VHGHRLQPDHHAQPS

SEQ ID NO: 3240 - protein, 15 aa, synthetic construct
VHGWARSDWQLSWQS

SEQ ID NO: 3241 - protein, 15 aa, synthetic construct
VHHHMPSGGVPPVHP

SEQ ID NO: 3242 - protein, 15 aa, synthetic construct
VHHHQGAQQAGRAAP

SEQ ID NO: 3243 - protein, 15 aa, synthetic construct
VHHHSPTPEAQCIQF

SEQ ID NO: 3244 - protein, 15 aa, synthetic construct
VHHPFPAQHPGHALA

SEQ ID NO: 3245 - protein, 15 aa, synthetic construct
VHLPEADADHPRAGL

SEQ ID NO: 3246 - protein, 15 aa, synthetic construct
VHLPGVLPAGMTDPP

SEQ ID NO: 3247 - protein, 15 aa, synthetic construct
VHLSGGGSGRRGHRS

SEQ ID NO: 3248 - protein, 15 aa, synthetic construct
VHNGKRGQLPGGDVL

SEQ ID NO: 3249 - protein, 15 aa, synthetic construct
VHNQSLEQLISDHVH

SEQ ID NO: 3250 - protein, 15 aa, synthetic construct
VHPEPIQEGQRDHSR

SEQ ID NO: 3251 - protein, 15 aa, synthetic construct
VHPLQLPGIHLALSR

SEQ ID NO: 3252 - protein, 15 aa, synthetic construct
VHPPTARPLSPQPRA

SEQ ID NO: 3253 - protein, 15 aa, synthetic construct
VHPQPAGEAHQDGLA

SEQ ID NO: 3254 - protein, 15 aa, synthetic construct
VHQGPGETDSAAGAR

SEQ ID NO: 3255 - protein, 15 aa, synthetic construct
VHQGQEVQRTSKGDL

SEQ ID NO: 3256 - protein, 15 aa, synthetic construct
VHQHSLRVAQSAAAS

SEQ ID NO: 3257 - protein, 15 aa, synthetic construct
VHQLEVRVCKGRNRS

SEQ ID NO: 3258 - protein, 15 aa, synthetic construct
VHQRSDYWEPLGALR

SEQ ID NO: 3259 - protein, 15 aa, synthetic construct
VHQTRTSHQNPIKQR

SEQ ID NO: 3260 - protein, 15 aa, synthetic construct
VHQVCWQTKISLQVP

SEQ ID NO: 3261 - protein, 15 aa, synthetic construct
VHSLGPVAVLATQAP

SEQ ID NO: 3262 - protein, 15 aa, synthetic construct
VHVESKTHQKTEVSL

SEQ ID NO: 3263 - protein, 15 aa, synthetic construct
VHVQPEMRGGGKLSG

SEQ ID NO: 3264 - protein, 15 aa, synthetic construct
VHVQVQLGVALAVPG

SEQ ID NO: 3265 - protein, 15 aa, synthetic construct
VHVRAGRPGQLLGTL

SEQ ID NO: 3266 - protein, 15 aa, synthetic construct
VIASGAGLGPRGRAA

SEQ ID NO: 3267 - protein, 15 aa, synthetic construct
VISEPHPDPQSPPAA

SEQ ID NO: 3268 - protein, 15 aa, synthetic construct
VITPRPAARDAPAGG

SEQ ID NO: 3269 - protein, 15 aa, synthetic construct
VIWEEGGSRGGGGCS

SEQ ID NO: 3270 - protein, 15 aa, synthetic construct
VKACAYCSSDTKSWH

SEQ ID NO: 3271 - protein, 15 aa, synthetic construct
VKGRPESGADAGADA

SEQ ID NO: 3272 - protein, 15 aa, synthetic construct
VKTGKTYSKPWLGSC

SEQ ID NO: 3273 - protein, 15 aa, synthetic construct
VLAAPPPAQIPVPGP

SEQ ID NO: 3274 - protein, 15 aa, synthetic construct
VLAAPRLRAPSSRGL

SEQ ID NO: 3275 - protein, 15 aa, synthetic construct
VLAPCARRAVPGRHG

SEQ ID NO: 3276 - protein, 15 aa, synthetic construct
VLAPGLAPSHRLPGG

SEQ ID NO: 3277 - protein, 15 aa, synthetic construct
VLASTSPRGPGPGAQ

SEQ ID NO: 3278 - protein, 15 aa, synthetic construct
VLCLSCPWNGQQFFD

SEQ ID NO: 3279 - protein, 15 aa, synthetic construct
VLCPPGAPRRAAPRR

SEQ ID NO: 3280 - protein, 15 aa, synthetic construct
VLCREEGPQDRGLSD

SEQ ID NO: 3281 - protein, 15 aa, synthetic construct
VLCSLQPRPCLRAVS

SEQ ID NO: 3282 - protein, 15 aa, synthetic construct
VLCTCTDCHGIRCAF

SEQ ID NO: 3283 - protein, 15 aa, synthetic construct
VLDRERRPHGGQVAA

SEQ ID NO: 3284 - protein, 15 aa, synthetic construct
VLEILVAFQGLEVAS

SEQ ID NO: 3285 - protein, 15 aa, synthetic construct
VLFERPLSPGPGCAL

SEQ ID NO: 3286 - protein, 15 aa, synthetic construct
VLFGMFRGDPEAVVA

SEQ ID NO: 3287 - protein, 15 aa, synthetic construct
VLGLRPRSRLAAPAV

SEQ ID NO: 3288 - protein, 15 aa, synthetic construct
VLGLRRGRPLPPAPP

SEQ ID NO: 3289 - protein, 15 aa, synthetic construct
VLGPLVRAAGGPRRA

SEQ ID NO: 3290 - protein, 15 aa, synthetic construct
VLGRSPALPPSAACR

SEQ ID NO: 3291 - protein, 15 aa, synthetic construct
VLGVWKTPRGQRASE

SEQ ID NO: 3292 - protein, 15 aa, synthetic construct
VLHPGGRGFRLPHPQ

SEQ ID NO: 3293 - protein, 15 aa, synthetic construct
VLHWTQPTPPWNLRM

SEQ ID NO: 3294 - protein, 15 aa, synthetic construct
VLLAAAPAVGAAPRD

SEQ ID NO: 3295 - protein, 15 aa, synthetic construct
VLLAEGNLLAASYQE

SEQ ID NO: 3296 - protein, 15 aa, synthetic construct
VLLAPASPEGGPRPR

SEQ ID NO: 3297 - protein, 15 aa, synthetic construct
VLLAPPPAVQSVQVA

SEQ ID NO: 3298 - protein, 15 aa, synthetic construct
VLLGLPVPAAQDAGE

SEQ ID NO: 3299 - protein, 15 aa, synthetic construct
VLLLGQHSGLSRAGA

SEQ ID NO: 3300 - protein, 15 aa, synthetic construct
VLLPCPIVGSAPGGA

SEQ ID NO: 3301 - protein, 15 aa, synthetic construct
VLLPTAGLPLRQLGQ

SEQ ID NO: 3302 - protein, 15 aa, synthetic construct
VLLQDSTNSSRSSAF

SEQ ID NO: 3303 - protein, 15 aa, synthetic construct
VLLRAGAAGARAPRR

SEQ ID NO: 3304 - protein, 15 aa, synthetic construct
VLLRGAPGPGGWPHR

SEQ ID NO: 3305 - protein, 15 aa, synthetic construct
VLLRGQSQVADVGSQ

SEQ ID NO: 3306 - protein, 15 aa, synthetic construct
VLLSQQSVTHGSLLL

SEQ ID NO: 3307 - protein, 15 aa, synthetic construct
VLLSQRASAPHRLLC

SEQ ID NO: 3308 - protein, 15 aa, synthetic construct
VLPAAGLPAVPERRG

SEQ ID NO: 3309 - protein, 15 aa, synthetic construct
VLPAAPGHPARRPRH

SEQ ID NO: 3310 - protein, 15 aa, synthetic construct
VLPAEPAAVPAPSQV

SEQ ID NO: 3311 - protein, 15 aa, synthetic construct
VLPAEPAAVPASAQV

SEQ ID NO: 3312 - protein, 15 aa, synthetic construct
VLPAEPTAVPAPSQV

SEQ ID NO: 3313 - protein, 15 aa, synthetic construct
VLPAGGRCCLRRARV

SEQ ID NO: 3314 - protein, 15 aa, synthetic construct
VLPAGLPVPGARLAG

SEQ ID NO: 3315 - protein, 15 aa, synthetic construct
VLPAKPAAVPAPSQL

SEQ ID NO: 3316 - protein, 15 aa, synthetic construct
VLPALVPDGPAHPRG

SEQ ID NO: 3317 - protein, 15 aa, synthetic construct
VLPAPRPTNLPTAAD

SEQ ID NO: 3318 - protein, 15 aa, synthetic construct
VLPEDASISALTPCA

SEQ ID NO: 3319 - protein, 15 aa, synthetic construct
VLPFLVKSAVQGFIQ

SEQ ID NO: 3320 - protein, 15 aa, synthetic construct
VLPGAARHGHLHRPL

SEQ ID NO: 3321 - protein, 15 aa, synthetic construct
VLPGLRAADGRRVLR

SEQ ID NO: 3322 - protein, 15 aa, synthetic construct
VLPKEPRGCEEVHPE

SEQ ID NO: 3323 - protein, 15 aa, synthetic construct
VLPKPHHSDRIHSLG

SEQ ID NO: 3324 - protein, 15 aa, synthetic construct
VLPKPPEPGHRGQGL

SEQ ID NO: 3325 - protein, 15 aa, synthetic construct
VLPLLPSQLWSPGGQ

SEQ ID NO: 3326 - protein, 15 aa, synthetic construct
VLPPAGIPIHPPALP

SEQ ID NO: 3327 - protein, 15 aa, synthetic construct
VLPPSAPPSSLSALR

SEQ ID NO: 3328 - protein, 15 aa, synthetic construct
VLPPYAPLSSPSALR

SEQ ID NO: 3329 - protein, 15 aa, synthetic construct
VLPQQPPSPLHGPLN

SEQ ID NO: 3330 - protein, 15 aa, synthetic construct
VLQLLHKKLLFQAHW

SEQ ID NO: 3331 - protein, 15 aa, synthetic construct
VLQQLLQASKSLPCG

SEQ ID NO: 3332 - protein, 15 aa, synthetic construct
VLQRLGFVSGSGIAT

SEQ ID NO: 3333 - protein, 15 aa, synthetic construct
VLQRRKLALVIHQNK

SEQ ID NO: 3334 - protein, 15 aa, synthetic construct
VLQTHRPCSQQHPWL

SEQ ID NO: 3335 - protein, 15 aa, synthetic construct
VLQYPSLSASPASWR

SEQ ID NO: 3336 - protein, 15 aa, synthetic construct
VLRAALAHPAAPQDE

SEQ ID NO: 3337 - protein, 15 aa, synthetic construct
VLRAALPGPGQPGGG

SEQ ID NO: 3338 - protein, 15 aa, synthetic construct
VLRAPGAPAAHLALL

SEQ ID NO: 3339 - protein, 15 aa, synthetic construct
VLREVEPRGGNVSLH

SEQ ID NO: 3340 - protein, 15 aa, synthetic construct
VLRGLLQWQREGDYA

SEQ ID NO: 3341 - protein, 15 aa, synthetic construct
VLRGMSLSFPCGTIG

SEQ ID NO: 3342 - protein, 15 aa, synthetic construct
VLRGVRAPRRQEAGA

SEQ ID NO: 3343 - protein, 15 aa, synthetic construct
VLRHAAPGAAGPLPV

SEQ ID NO: 3344 - protein, 15 aa, synthetic construct
VLRIHNPGHGRQLFD

SEQ ID NO: 3345 - protein, 15 aa, synthetic construct
VLRRDSLPDSLMEAS

SEQ ID NO: 3346 - protein, 15 aa, synthetic construct
VLSAGLLVPAVRLAG

SEQ ID NO: 3347 - protein, 15 aa, synthetic construct
VLSPSIPQNVPQSVH

SEQ ID NO: 3348 - protein, 15 aa, synthetic construct
VLSQQEHISPSHIFP

SEQ ID NO: 3349 - protein, 15 aa, synthetic construct
VLSRGAAAGRRRRGT

SEQ ID NO: 3350 - protein, 15 aa, synthetic construct
VLSRGCRWAVGLDLA

SEQ ID NO: 3351 - protein, 15 aa, synthetic construct
VLSSIPPLLAPRPPL

SEQ ID NO: 3352 - protein, 15 aa, synthetic construct
VLSSSQLLSRPYKER

SEQ ID NO: 3353 - protein, 15 aa, synthetic construct
VLVATATAAARFGPA

SEQ ID NO: 3354 - protein, 15 aa, synthetic construct
VLVGAVGSMRGESGY

SEQ ID NO: 3355 - protein, 15 aa, synthetic construct
VLVRAPDCETSGPQR

SEQ ID NO: 3356 - protein, 15 aa, synthetic construct
VLVSRQRPPAQPEPR

SEQ ID NO: 3357 - protein, 15 aa, synthetic construct
VLWEIPEYSSKSGFS

SEQ ID NO: 3358 - protein, 15 aa, synthetic construct
VLYQEFAPGCFDVSA

SEQ ID NO: 3359 - protein, 15 aa, synthetic construct
VNGTGGGSRGPVRAP

SEQ ID NO: 3360 - protein, 15 aa, synthetic construct
VNPAAAAPAAACVQS

SEQ ID NO: 3361 - protein, 15 aa, synthetic construct
VNQETFGRRSRRLPD

SEQ ID NO: 3362 - protein, 15 aa, synthetic construct
VPAEPLPLLPGLLPG

SEQ ID NO: 3363 - protein, 15 aa, synthetic construct
VPAGGAEGGGGRGGA

SEQ ID NO: 3364 - protein, 15 aa, synthetic construct
VPAGGMRPQLFGGEE

SEQ ID NO: 3365 - protein, 15 aa, synthetic construct
VPAHALEHHADAQPP

SEQ ID NO: 3366 - protein, 15 aa, synthetic construct
VPAPPTAARALLPRG

SEQ ID NO: 3367 - protein, 15 aa, synthetic construct
VPCSGGGRQDRVCWE

SEQ ID NO: 3368 - protein, 15 aa, synthetic construct
VPDFHPRQHPAQCGT

SEQ ID NO: 3369 - protein, 15 aa, synthetic construct
VPDRLASREGLGRAL

SEQ ID NO: 3370 - protein, 15 aa, synthetic construct
VPDSGSAADPAAAAG

SEQ ID NO: 3371 - protein, 15 aa, synthetic construct
VPEPAHRAHFRRLHL

SEQ ID NO: 3372 - protein, 15 aa, synthetic construct
VPEQAPRRGPAAGAR

SEQ ID NO: 3373 - protein, 15 aa, synthetic construct
VPERPPGQLPGEGAS

SEQ ID NO: 3374 - protein, 15 aa, synthetic construct
VPFALWGWAGRSESS

SEQ ID NO: 3375 - protein, 15 aa, synthetic construct
VPGAVGAGQGATPAP

SEQ ID NO: 3376 - protein, 15 aa, synthetic construct
VPGGFGACSHHAPLP

SEQ ID NO: 3377 - protein, 15 aa, synthetic construct
VPGPLSPGRPPAAGL

SEQ ID NO: 3378 - protein, 15 aa, synthetic construct
VPGVSLHAAGPPLPR

SEQ ID NO: 3379 - protein, 15 aa, synthetic construct
VPKGAASGGVCGLQR

SEQ ID NO: 3380 - protein, 15 aa, synthetic construct
VPLAEESGAAALGGR

SEQ ID NO: 3381 - protein, 15 aa, synthetic construct
VPLHPSGAVPVAAPG

SEQ ID NO: 3382 - protein, 15 aa, synthetic construct
VPLPASPQHVSVRQE

SEQ ID NO: 3383 - protein, 15 aa, synthetic construct
VPPADEANGSLRPAH

SEQ ID NO: 3384 - protein, 15 aa, synthetic construct
VPPATAAGAASGGAG

SEQ ID NO: 3385 - protein, 15 aa, synthetic construct
VPPNLGSSALLLWYY

SEQ ID NO: 3386 - protein, 15 aa, synthetic construct
VPPQGRQRAPPSRAR

SEQ ID NO: 3387 - protein, 15 aa, synthetic construct
VPPQKQAPGPACPVP

SEQ ID NO: 3388 - protein, 15 aa, synthetic construct
VPPQTGQPAALVPEG

SEQ ID NO: 3389 - protein, 15 aa, synthetic construct
VPQPCSHAHALLSQR

SEQ ID NO: 3390 - protein, 15 aa, synthetic construct
VPRGPPQPQPPPAPP

SEQ ID NO: 3391 - protein, 15 aa, synthetic construct
VPRGSVDFVGAPRGA

SEQ ID NO: 3392 - protein, 15 aa, synthetic construct
VPRGTGAAAAPTEVR

SEQ ID NO: 3393 - protein, 15 aa, synthetic construct
VPVLPEGLSHRPHHP

SEQ ID NO: 3394 - protein, 15 aa, synthetic construct
VPVSITPSPSPEYGG

SEQ ID NO: 3395 - protein, 15 aa, synthetic construct
VQAAAAAARGAVLPV

SEQ ID NO: 3396 - protein, 15 aa, synthetic construct
VQAARRQQCPADRRG

SEQ ID NO: 3397 - protein, 15 aa, synthetic construct
VQAAVAWARARTPRP

SEQ ID NO: 3398 - protein, 15 aa, synthetic construct
VQATSELSVEEPGPA

SEQ ID NO: 3399 - protein, 15 aa, synthetic construct
VQDATPVLHCTKSCT

SEQ ID NO: 3400 - protein, 15 aa, synthetic construct
VQDEDLKKGLSRKKW

SEQ ID NO: 3401 - protein, 15 aa, synthetic construct
VQDQTICARPASLEE

SEQ ID NO: 3402 - protein, 15 aa, synthetic construct
VQDRQRRPRSLFRAL

SEQ ID NO: 3403 - protein, 15 aa, synthetic construct
VQGEVRQAQQEARLQ

SEQ ID NO: 3404 - protein, 15 aa, synthetic construct
VQGLHRVHWRLFSSL

SEQ ID NO: 3405 - protein, 15 aa, synthetic construct
VQGRLDVARERRRRA

SEQ ID NO: 3406 - protein, 15 aa, synthetic construct
VQHAAIKSFTHLFNG

SEQ ID NO: 3407 - protein, 15 aa, synthetic construct
VQHKWQCNHRIHFTW

SEQ ID NO: 3408 - protein, 15 aa, synthetic construct
VQHRRGGEDAAPLPD

SEQ ID NO: 3409 - protein, 15 aa, synthetic construct
VQKAQPSVTAQHHRR

SEQ ID NO: 3410 - protein, 15 aa, synthetic construct
VQKAQVPRFGTQESI

SEQ ID NO: 3411 - protein, 15 aa, synthetic construct
VQKHVPERLPLHPLQ

SEQ ID NO: 3412 - protein, 15 aa, synthetic construct
VQKLLPLPDGRADSQ

SEQ ID NO: 3413 - protein, 15 aa, synthetic construct
VQLCGPPAPAPLSGH

SEQ ID NO: 3414 - protein, 15 aa, synthetic construct
VQLCPDRDGGAGVQC

SEQ ID NO: 3415 - protein, 15 aa, synthetic construct
VQLHRAAAGRQRVHL

SEQ ID NO: 3416 - protein, 15 aa, synthetic construct
VQLQYSSTLPLGDHC

SEQ ID NO: 3417 - protein, 15 aa, synthetic construct
VQPAAHGQRKHRLLR

SEQ ID NO: 3418 - protein, 15 aa, synthetic construct
VQPAGAALPWLVPGG

SEQ ID NO: 3419 - protein, 15 aa, synthetic construct
VQPDAAGGRSPGRAG

SEQ ID NO: 3420 - protein, 15 aa, synthetic construct
VQPQLGGCRRPQPCL

SEQ ID NO: 3421 - protein, 15 aa, synthetic construct
VQPRREPAEQEAAAV

SEQ ID NO: 3422 - protein, 15 aa, synthetic construct
VQPSGLPRSQSRREL

SEQ ID NO: 3423 - protein, 15 aa, synthetic construct
VQQKQQQASQQPAAV

SEQ ID NO: 3424 - protein, 15 aa, synthetic construct
VQQMLLSFLYLQTCR

SEQ ID NO: 3425 - protein, 15 aa, synthetic construct
VQRCWGHDGSVGSEG

SEQ ID NO: 3426 - protein, 15 aa, synthetic construct
VQRGAGPHLPPLGDS

SEQ ID NO: 3427 - protein, 15 aa, synthetic construct
VQRHPTDSVHPHGPS

SEQ ID NO: 3428 - protein, 15 aa, synthetic construct
VQRMGAASITFKGDL

SEQ ID NO: 3429 - protein, 15 aa, synthetic construct
VQRPQKGQRPLAQLL

SEQ ID NO: 3430 - protein, 15 aa, synthetic construct
VQRQPTDSVHPHGPS

SEQ ID NO: 3431 - protein, 15 aa, synthetic construct
VQRSDPPTHAEREGH

SEQ ID NO: 3432 - protein, 15 aa, synthetic construct
VQRSTTSFQDAAQRK

SEQ ID NO: 3433 - protein, 15 aa, synthetic construct
VQRVGSGECFHDVVR

SEQ ID NO: 3434 - protein, 15 aa, synthetic construct
VQTFRPHQAAHERLH

SEQ ID NO: 3435 - protein, 15 aa, synthetic construct
VQVHRMQPGGQRVVP

SEQ ID NO: 3436 - protein, 15 aa, synthetic construct
VQVQTLGAGAATLAK

SEQ ID NO: 3437 - protein, 15 aa, synthetic construct
VRAAGDQAAHAEDAG

SEQ ID NO: 3438 - protein, 15 aa, synthetic construct
VRAAGNAVGNREGTD

SEQ ID NO: 3439 - protein, 15 aa, synthetic construct
VRADAGRGRCCGGPG

SEQ ID NO: 3440 - protein, 15 aa, synthetic construct
VRADGGLRGRPGEAT

SEQ ID NO: 3441 - protein, 15 aa, synthetic construct
VRADGRSHNSGPSGA

SEQ ID NO: 3442 - protein, 15 aa, synthetic construct
VRAEAGGRRAGRGRR

SEQ ID NO: 3443 - protein, 15 aa, synthetic construct
VRAGEDGSGAPPPPA

SEQ ID NO: 3444 - protein, 15 aa, synthetic construct
VRAGGPARAAPGGPG

SEQ ID NO: 3445 - protein, 15 aa, synthetic construct
VRDCACRARCSGPCR

SEQ ID NO: 3446 - protein, 15 aa, synthetic construct
VRDGGRGGGGRPGPG

SEQ ID NO: 3447 - protein, 15 aa, synthetic construct
VRDGRQEAQGQVQGL

SEQ ID NO: 3448 - protein, 15 aa, synthetic construct
VREALPPLHHRPRHQ

SEQ ID NO: 3449 - protein, 15 aa, synthetic construct
VREETALGRQESSEA

SEQ ID NO: 3450 - protein, 15 aa, synthetic construct
VREEVSGRPHLLYLL

SEQ ID NO: 3451 - protein, 15 aa, synthetic construct
VREIFKTYVPLPWLQ

SEQ ID NO: 3452 - protein, 15 aa, synthetic construct
VRESWRRLFLHPEPW

SEQ ID NO: 3453 - protein, 15 aa, synthetic construct
VRGAGHAGQRGRLRP

SEQ ID NO: 3454 - protein, 15 aa, synthetic construct
VRGARGGPASDDRRG

SEQ ID NO: 3455 - protein, 15 aa, synthetic construct
VRGARSADQHRIGLR

SEQ ID NO: 3456 - protein, 15 aa, synthetic construct
VRGAVDVLRVAEHRA

SEQ ID NO: 3457 - protein, 15 aa, synthetic construct
VRGEAGAAVRTARVL

SEQ ID NO: 3458 - protein, 15 aa, synthetic construct
VRGGADPQPLPAAGR

SEQ ID NO: 3459 - protein, 15 aa, synthetic construct
VRGGSAAGPRAVCGS

SEQ ID NO: 3460 - protein, 15 aa, synthetic construct
VRGHCGLSLGLGSRG

SEQ ID NO: 3461 - protein, 15 aa, synthetic construct
VRGSGKDDTALWDGG

SEQ ID NO: 3462 - protein, 15 aa, synthetic construct
VRHPGDPGLEQGAPE

SEQ ID NO: 3463 - protein, 15 aa, synthetic construct
VRLPDQPQPAQGATR

SEQ ID NO: 3464 - protein, 15 aa, synthetic construct
VRPEPDGPNHCRPAQ

SEQ ID NO: 3465 - protein, 15 aa, synthetic construct
VRPGADAGPAGPAHG

SEQ ID NO: 3466 - protein, 15 aa, synthetic construct
VRPPAAGFPEDEIRE

SEQ ID NO: 3467 - protein, 15 aa, synthetic construct
VRQGGQGFGRALRQP

SEQ ID NO: 3468 - protein, 15 aa, synthetic construct
VRQGVHVGPEKRRLG

SEQ ID NO: 3469 - protein, 15 aa, synthetic construct
VRQHAGTVQVAALQR

SEQ ID NO: 3470 - protein, 15 aa, synthetic construct
VRSDSAGVFRSRWRP

SEQ ID NO: 3471 - protein, 15 aa, synthetic construct
VRSGDLRAPRHGGRR

SEQ ID NO: 3472 - protein, 15 aa, synthetic construct
VRSHRAEPPPARQHD

SEQ ID NO: 3473 - protein, 15 aa, synthetic construct
VSAAAAAASVAAATS

SEQ ID NO: 3474 - protein, 15 aa, synthetic construct
VSAKAAETPTVNLGL

SEQ ID NO: 3475 - protein, 15 aa, synthetic construct
VSAKDPSDPSVRGTG

SEQ ID NO: 3476 - protein, 15 aa, synthetic construct
VSAPAAAAADTRLWR

SEQ ID NO: 3477 - protein, 15 aa, synthetic construct
VSAPAPRAAARGPGP

SEQ ID NO: 3478 - protein, 15 aa, synthetic construct
VSARRVWRGLRCWAT

SEQ ID NO: 3479 - protein, 15 aa, synthetic construct
VSAVELVVALGSVAE

SEQ ID NO: 3480 - protein, 15 aa, synthetic construct
VSCKGSIGRSRSRSW

SEQ ID NO: 3481 - protein, 15 aa, synthetic construct
VSCRLEAPGHVGSGP

SEQ ID NO: 3482 - protein, 15 aa, synthetic construct
VSCSLGPPGRPRLTS

SEQ ID NO: 3483 - protein, 15 aa, synthetic construct
VSFCAAWCRVGSCGT

SEQ ID NO: 3484 - protein, 15 aa, synthetic construct
VSFHFITGDPTPCLG

SEQ ID NO: 3485 - protein, 15 aa, synthetic construct
VSFPLLRGRSPGSLT

SEQ ID NO: 3486 - protein, 15 aa, synthetic construct
VSGFPRRLRLRLPVQ

SEQ ID NO: 3487 - protein, 15 aa, synthetic construct
VSGQRHAGSVTCKLS

SEQ ID NO: 3488 - protein, 15 aa, synthetic construct
VSGSSRPVRGRTSAW

SEQ ID NO: 3489 - protein, 15 aa, synthetic construct
VSGWLLPTPVVGREE

SEQ ID NO: 3490 - protein, 15 aa, synthetic construct
VSGYARASPAAHCDP

SEQ ID NO: 3491 - protein, 15 aa, synthetic construct
VSHPARNLLVVRKSA

SEQ ID NO: 3492 - protein, 15 aa, synthetic construct
VSKEDFVRVLQLPGL

SEQ ID NO: 3493 - protein, 15 aa, synthetic construct
VSKIWPRFSSTCWWQ

SEQ ID NO: 3494 - protein, 15 aa, synthetic construct
VSLAVQSSRFPSSWS

SEQ ID NO: 3495 - protein, 15 aa, synthetic construct
VSLHEAPQHLPVHQE

SEQ ID NO: 3496 - protein, 15 aa, synthetic construct
VSLQYHLNTSNCLLV

SEQ ID NO: 3497 - protein, 15 aa, synthetic construct
VSLRGLSCARATLSF

SEQ ID NO: 3498 - protein, 15 aa, synthetic construct
VSLSQLPPDHDHPAG

SEQ ID NO: 3499 - protein, 15 aa, synthetic construct
VSLWRKSQRKNDGGL

SEQ ID NO: 3500 - protein, 15 aa, synthetic construct
VSNADPGAPRPLLLE

SEQ ID NO: 3501 - protein, 15 aa, synthetic construct
VSNRFFFPQSLSCCC

SEQ ID NO: 3502 - protein, 15 aa, synthetic construct
VSNSVPGEVAGWEPH

SEQ ID NO: 3503 - protein, 15 aa, synthetic construct
VSPAGRPRASRCSRC

SEQ ID NO: 3504 - protein, 15 aa, synthetic construct
VSPARPLGPAPRPLL

SEQ ID NO: 3505 - protein, 15 aa, synthetic construct
VSPEACVGRPRCLQL

SEQ ID NO: 3506 - protein, 15 aa, synthetic construct
VSPFCFISEACSLGH

SEQ ID NO: 3507 - protein, 15 aa, synthetic construct
VSPGELPQPHQVLPL

SEQ ID NO: 3508 - protein, 15 aa, synthetic construct
VSPGSGRAAAVAELL

SEQ ID NO: 3509 - protein, 15 aa, synthetic construct
VSPIFAQSSIHAAIQ

SEQ ID NO: 3510 - protein, 15 aa, synthetic construct
VSPLLASQPVTGELH

SEQ ID NO: 3511 - protein, 15 aa, synthetic construct
VSPLRRSQVARVALA

SEQ ID NO: 3512 - protein, 15 aa, synthetic construct
VSPPLRGLQQPGSGL

SEQ ID NO: 3513 - protein, 15 aa, synthetic construct
VSPPRAGAAGCRAPQ

SEQ ID NO: 3514 - protein, 15 aa, synthetic construct
VSPSAHAADGRAQKA

SEQ ID NO: 3515 - protein, 15 aa, synthetic construct
VSPSRAGARDATPRP

SEQ ID NO: 3516 - protein, 15 aa, synthetic construct
VSPSRPGRALPASSQ

SEQ ID NO: 3517 - protein, 15 aa, synthetic construct
VSPVGGPRGAVAPVG

SEQ ID NO: 3518 - protein, 15 aa, synthetic construct
VSPVGVPRGAVAPVG

SEQ ID NO: 3519 - protein, 15 aa, synthetic construct
VSPVLPQRAGRSSLY

SEQ ID NO: 3520 - protein, 15 aa, synthetic construct
VSQPSGRRSARGKQT

SEQ ID NO: 3521 - protein, 15 aa, synthetic construct
VSRGAAEAAPAAGVG

SEQ ID NO: 3522 - protein, 15 aa, synthetic construct
VSRGATCRDPKQPGH

SEQ ID NO: 3523 - protein, 15 aa, synthetic construct
VSRPAPAPTALLPGP

SEQ ID NO: 3524 - protein, 15 aa, synthetic construct
VSSLVWEKREKTSTN

SEQ ID NO: 3525 - protein, 15 aa, synthetic construct
VSSNRASDGGRWRVR

SEQ ID NO: 3526 - protein, 15 aa, synthetic construct
VSSTFQCIQEVLSSS

SEQ ID NO: 3527 - protein, 15 aa, synthetic construct
VSSWGRGSREGALTA

SEQ ID NO: 3528 - protein, 15 aa, synthetic construct
VSTNLRESHLKRIYK

SEQ ID NO: 3529 - protein, 15 aa, synthetic construct
VSTNLTGLHSSHTSF

SEQ ID NO: 3530 - protein, 15 aa, synthetic construct
VSTRGCAVVRPAALR

SEQ ID NO: 3531 - protein, 15 aa, synthetic construct
VSVCRWRGPGGAEGL

SEQ ID NO: 3532 - protein, 15 aa, synthetic construct
VSVLISSSVSRSRGA

SEQ ID NO: 3533 - protein, 15 aa, synthetic construct
VSVRSDCGLALGAGL

SEQ ID NO: 3534 - protein, 15 aa, synthetic construct
VSWGTVGGPAPAVPA

SEQ ID NO: 3535 - protein, 15 aa, synthetic construct
VTARDAMRVSWRPFW

SEQ ID NO: 3536 - protein, 15 aa, synthetic construct
VTARPRWADACEWSG

SEQ ID NO: 3537 - protein, 15 aa, synthetic construct
VTHHLPQGQQPATAA

SEQ ID NO: 3538 - protein, 15 aa, synthetic construct
VTLPALEPVLIQMKI

SEQ ID NO: 3539 - protein, 15 aa, synthetic construct
VTLRGAPGRQRCPAT

SEQ ID NO: 3540 - protein, 15 aa, synthetic construct
VTMAVAMVKLCERAG

SEQ ID NO: 3541 - protein, 15 aa, synthetic construct
VTPRGHGASFWSPWP

SEQ ID NO: 3542 - protein, 15 aa, synthetic construct
VTPTGLPPPSRRSIR

SEQ ID NO: 3543 - protein, 15 aa, synthetic construct
VTQSCRATQPSVQSS

SEQ ID NO: 3544 - protein, 15 aa, synthetic construct
VTTRCVNRASSRPSK

SEQ ID NO: 3545 - protein, 15 aa, synthetic construct
VVAHRVGHQRGHPGH

SEQ ID NO: 3546 - protein, 15 aa, synthetic construct
VVAPAVGAVAPAVGA

SEQ ID NO: 3547 - protein, 15 aa, synthetic construct
VVARGAAAVAVTTPT

SEQ ID NO: 3548 - protein, 15 aa, synthetic construct
VVAVGVAGPSGPSGR

SEQ ID NO: 3549 - protein, 15 aa, synthetic construct
VVDQSHCPLQNGSSA

SEQ ID NO: 3550 - protein, 15 aa, synthetic construct
VVEVEVAVAVARLEG

SEQ ID NO: 3551 - protein, 15 aa, synthetic construct
VVGASESLRLSSLRP

SEQ ID NO: 3552 - protein, 15 aa, synthetic construct
VVGIRGRARSRFPGD

SEQ ID NO: 3553 - protein, 15 aa, synthetic construct
VVGSIPLRPVRARPV

SEQ ID NO: 3554 - protein, 15 aa, synthetic construct
VVGSSSLLDPGPWRQ

SEQ ID NO: 3555 - protein, 15 aa, synthetic construct
VVHAPAPAQRLAGGP

SEQ ID NO: 3556 - protein, 15 aa, synthetic construct
VVHCGFLPSLYARRI

SEQ ID NO: 3557 - protein, 15 aa, synthetic construct
VVHVPAELAVALHPG

SEQ ID NO: 3558 - protein, 15 aa, synthetic construct
VVLDQKGDQHRESPR

SEQ ID NO: 3559 - protein, 15 aa, synthetic construct
VVLQPRGAGDRGQQG

SEQ ID NO: 3560 - protein, 15 aa, synthetic construct
VVLYSHVFGSWQRLG

SEQ ID NO: 3561 - protein, 15 aa, synthetic construct
VVNQYQGLKNRIPPR

SEQ ID NO: 3562 - protein, 15 aa, synthetic construct
VVPAGPRRWAGLWRP

SEQ ID NO: 3563 - protein, 15 aa, synthetic construct
VVPALQLGEDPVPSG

SEQ ID NO: 3564 - protein, 15 aa, synthetic construct
VVPAVGAVAPAVGAV

SEQ ID NO: 3565 - protein, 15 aa, synthetic construct
VVPEGKKIKKTNALR

SEQ ID NO: 3566 - protein, 15 aa, synthetic construct
VVPGEDPRSRSGTRE

SEQ ID NO: 3567 - protein, 15 aa, synthetic construct
VVPGTSRALAAPSLQ

SEQ ID NO: 3568 - protein, 15 aa, synthetic construct
VVPKPHHSDRIHSLR

SEQ ID NO: 3569 - protein, 15 aa, synthetic construct
VVPLLQDQLRMRGHQ

SEQ ID NO: 3570 - protein, 15 aa, synthetic construct
VVPRLGLRLGFRARG

SEQ ID NO: 3571 - protein, 15 aa, synthetic construct
VVPVADWGPVAKAAL

SEQ ID NO: 3572 - protein, 15 aa, synthetic construct
VVQLRGNGPEAHRRE

SEQ ID NO: 3573 - protein, 15 aa, synthetic construct
VVQRPGRCWGPGDIA

SEQ ID NO: 3574 - protein, 15 aa, synthetic construct
VVRAGGDARVGLGGC

SEQ ID NO: 3575 - protein, 15 aa, synthetic construct
VVREPSCCGGLLRRA

SEQ ID NO: 3576 - protein, 15 aa, synthetic construct
VVRGQGGRWGLSRLP

SEQ ID NO: 3577 - protein, 15 aa, synthetic construct
VVRGRASATPASRER

SEQ ID NO: 3578 - protein, 15 aa, synthetic construct
VVSPWWPADSANHPT

SEQ ID NO: 3579 - protein, 15 aa, synthetic construct
VVTNQCHSDLVGFLC

SEQ ID NO: 3580 - protein, 15 aa, synthetic construct
VVVSQILLIHHSHTT

SEQ ID NO: 3581 - protein, 15 aa, synthetic construct
VVVTAGCLCCGGAIP

SEQ ID NO: 3582 - protein, 15 aa, synthetic construct
VVVVAAGGGCQRRHL

SEQ ID NO: 3583 - protein, 15 aa, synthetic construct
VVWHHEVQWLFEGPH

SEQ ID NO: 3584 - protein, 15 aa, synthetic construct
VWARAPRRCRAARAA

SEQ ID NO: 3585 - protein, 15 aa, synthetic construct
VWARQRREGSGQRRR

SEQ ID NO: 3586 - protein, 15 aa, synthetic construct
VWAVRPLENLRQCGL

SEQ ID NO: 3587 - protein, 15 aa, synthetic construct
VWAWQAGRQSSRQGQ

SEQ ID NO: 3588 - protein, 15 aa, synthetic construct
VWDSGKHPTEWKQHE

SEQ ID NO: 3589 - protein, 15 aa, synthetic construct
VWFSEKGIGHPTTTA

SEQ ID NO: 3590 - protein, 15 aa, synthetic construct
VWGQQLQPDPRILYL

SEQ ID NO: 3591 - protein, 15 aa, synthetic construct
VWGQQRPRARGPGPG

SEQ ID NO: 3592 - protein, 15 aa, synthetic construct
VWKCPLCWEGGAEQP

SEQ ID NO: 3593 - protein, 15 aa, synthetic construct
VWLPALKKPQRFPDR

SEQ ID NO: 3594 - protein, 15 aa, synthetic construct
VWNSRYFRKRTNSER

SEQ ID NO: 3595 - protein, 15 aa, synthetic construct
VWPLAELGGRGPWQD

SEQ ID NO: 3596 - protein, 15 aa, synthetic construct
VWPQKKRGNRTQPLL

SEQ ID NO: 3597 - protein, 15 aa, synthetic construct
VWPRGIPSKGSSPAS

SEQ ID NO: 3598 - protein, 15 aa, synthetic construct
VWQELYSCGASSPWH

SEQ ID NO: 3599 - protein, 15 aa, synthetic construct
VWRHPDPQRLRRERE

SEQ ID NO: 3600 - protein, 15 aa, synthetic construct
VWRPGCRLLQAGICW

SEQ ID NO: 3601 - protein, 15 aa, synthetic construct
VWRSAFEAVGAVYFG

SEQ ID NO: 3602 - protein, 15 aa, synthetic construct
VWSRAVHRLWKSTAL

SEQ ID NO: 3603 - protein, 15 aa, synthetic construct
VWSWQARRQGPRQGQ

SEQ ID NO: 3604 - protein, 15 aa, synthetic construct
VWSWQTRRQGPRQGQ

SEQ ID NO: 3605 - protein, 15 aa, synthetic construct
VWTSRLHQRWRRQEG

SEQ ID NO: 3606 - protein, 15 aa, synthetic construct
VWTWQAGRQGSRQGQ

SEQ ID NO: 3607 - protein, 15 aa, synthetic construct
VWVDLPSIWAVAWAE

SEQ ID NO: 3608 - protein, 15 aa, synthetic construct
WTMHPCRRRKPPNPR

SEQ ID NO: 3609 - protein, 15 aa, synthetic construct
AAAADRRVRLSLRRD

SEQ ID NO: 3610 - protein, 15 aa, synthetic construct
ASRPRPRPRRPGPGR

SEQ ID NO: 3611 - protein, 15 aa, synthetic construct
AWRARGPAGAASPRQ

SEQ ID NO: 3612 - protein, 15 aa, synthetic construct
CGCCSPASSSAPPCV

SEQ ID NO: 3613 - protein, 15 aa, synthetic construct
CPESRRRRAGRAAAA

SEQ ID NO: 3614 - protein, 15 aa, synthetic construct
CPPSAPSSASWPPRR

SEQ ID NO: 3615 - protein, 15 aa, synthetic construct
GDAAASALPAAPAAA

SEQ ID NO: 3616 - protein, 15 aa, synthetic construct
GSRAPARSGAGGAAG

SEQ ID NO: 3617 - protein, 15 aa, synthetic construct
GVRHQVRPLPSTRRR

SEQ ID NO: 3618 - protein, 15 aa, synthetic construct
IATLSPKAAPAPAIA

SEQ ID NO: 3619 - protein, 15 aa, synthetic construct
ITVMSPSLRWPPGSK

SEQ ID NO: 3620 - protein, 15 aa, synthetic construct
LVLGVAAATAAASAW

SEQ ID NO: 3621 - protein, 15 aa, synthetic construct
PRPAAARRPRRTGSR

SEQ ID NO: 3622 - protein, 15 aa, synthetic construct
RGQRRSAAGAPGAEP

SEQ ID NO: 3623 - protein, 15 aa, synthetic construct
RLEPPHPEQLLPAQP

SEQ ID NO: 3624 - protein, 15 aa, synthetic construct
RQQQAREEPGAAHYQ

SEQ ID NO: 3625 - protein, 15 aa, synthetic construct
SGAPGLVPPHRPHRA

SEQ ID NO: 3626 - protein, 15 aa, synthetic construct
SSSWPGLPASARASS

SEQ ID NO: 3627 - protein, 15 aa, synthetic construct
VLLVPAQRGIGAGAS

SEQ ID NO: 3628 - protein, 15 aa, synthetic construct
VRSVAAQAGLGPAGG

SEQ ID NO: 3629 - protein, 15 aa, synthetic construct
VRSVPPKRRRPSSAV

SEQ ID NO: 3630 - protein, 15 aa, synthetic construct
VVAVPIAPVCLLLWP

SEQ ID NO: 3631 - protein, 15 aa, synthetic construct
AAAGGAGRRDARGRG

SEQ ID NO: 3632 - protein, 15 aa, synthetic construct
AASGFSSCPWASAED

SEQ ID NO: 3633 - protein, 15 aa, synthetic construct
AGASGAGRPRAALLR

SEQ ID NO: 3634 - protein, 15 aa, synthetic construct
APGHPASRGAGGRVA

SEQ ID NO: 3635 - protein, 15 aa, synthetic construct
ASSHSWPSRGPRWPG

SEQ ID NO: 3636 - protein, 15 aa, synthetic construct
CRRRERTKRKARAKA

SEQ ID NO: 3637 - protein, 15 aa, synthetic construct
CSAPGPSAPSTGGSW

SEQ ID NO: 3638 - protein, 15 aa, synthetic construct
ENAPSFAAGAPGAGR

SEQ ID NO: 3639 - protein, 15 aa, synthetic construct
ESSVRHPSCALWSEE

SEQ ID NO: 3640 - protein, 15 aa, synthetic construct
GAAITSAVGGSPGRW

SEQ ID NO: 3641 - protein, 15 aa, synthetic construct
GGGITGGGGRGKAQR

SEQ ID NO: 3642 - protein, 15 aa, synthetic construct
GQRATITTTSRKTKT

SEQ ID NO: 3643 - protein, 15 aa, synthetic construct
GRLAAVQRAGAALPA

SEQ ID NO: 3644 - protein, 15 aa, synthetic construct
GRRAGGGAVRRHVAG

SEQ ID NO: 3645 - protein, 15 aa, synthetic construct
GSHRPRGARRRPLRP

SEQ ID NO: 3646 - protein, 15 aa, synthetic construct
HHEHFHHLLFLLPPK

SEQ ID NO: 3647 - protein, 15 aa, synthetic construct
LTSPDPGPCPSAARA

SEQ ID NO: 3648 - protein, 15 aa, synthetic construct
PALQGRGRSHPGAVL

SEQ ID NO: 3649 - protein, 15 aa, synthetic construct
QASESARPATPSTER

SEQ ID NO: 3650 - protein, 15 aa, synthetic construct
RAGGAGPRRRGEEQL

SEQ ID NO: 3651 - protein, 15 aa, synthetic construct
RGAGGGAHQPGTGPG

SEQ ID NO: 3652 - protein, 15 aa, synthetic construct
RPGPQRPQHLYPAVG

SEQ ID NO: 3653 - protein, 15 aa, synthetic construct
RRRRRRGAARRLQAR

SEQ ID NO: 3654 - protein, 15 aa, synthetic construct
WRRRRRQEAGRPERR

SEQ ID NO: 3655 - protein, 15 aa, synthetic construct
AAAGGAGRRALRPAR

SEQ ID NO: 3656 - protein, 15 aa, synthetic construct
AAAGTGGGRAAGAGS

SEQ ID NO: 3657 - protein, 15 aa, synthetic construct
AAGGGSRRRPAEWGG

SEQ ID NO: 3658 - protein, 15 aa, synthetic construct
AAPGKRRRRRICPQK

SEQ ID NO: 3659 - protein, 15 aa, synthetic construct
ACDRPPAPGTGASRW

SEQ ID NO: 3660 - protein, 15 aa, synthetic construct
ADRHHLRRAGRQRPA

SEQ ID NO: 3661 - protein, 15 aa, synthetic construct
AGGRGAGSGRRVLLR

SEQ ID NO: 3662 - protein, 15 aa, synthetic construct
APLHPQPAPAGAWSF

SEQ ID NO: 3663 - protein, 15 aa, synthetic construct
ARPGRGQQGPGLRRG

SEQ ID NO: 3664 - protein, 15 aa, synthetic construct
ARRLPVPGAAHRFAS

SEQ ID NO: 3665 - protein, 15 aa, synthetic construct
ARRQPRRRDGNAGPR

SEQ ID NO: 3666 - protein, 15 aa, synthetic construct
ASSLDLGAGLPPSCP

SEQ ID NO: 3667 - protein, 15 aa, synthetic construct
ATPWGGSPTAASRVA

SEQ ID NO: 3668 - protein, 15 aa, synthetic construct
CAAATTETTTATMAM

SEQ ID NO: 3669 - protein, 15 aa, synthetic construct
CGRHKACESAREEGE

SEQ ID NO: 3670 - protein, 15 aa, synthetic construct
CPFSPEAPAGKCCWQ

SEQ ID NO: 3671 - protein, 15 aa, synthetic construct
CPGGCRASWTPALAG

SEQ ID NO: 3672 - protein, 15 aa, synthetic construct
CRRKPPPRNPRPRRP

SEQ ID NO: 3673 - protein, 15 aa, synthetic construct
CTNITKSTSPRMPRA

SEQ ID NO: 3674 - protein, 15 aa, synthetic construct
DLTHIQHWKTVGFRA

SEQ ID NO: 3675 - protein, 15 aa, synthetic construct
DSVVLKNSSFSIFVS

SEQ ID NO: 3676 - protein, 15 aa, synthetic construct
ERRLSARWPEWTEMS

SEQ ID NO: 3677 - protein, 15 aa, synthetic construct
FKGAGLVHMEAWCNR

SEQ ID NO: 3678 - protein, 15 aa, synthetic construct
FSGGPSPRTRASASM

SEQ ID NO: 3679 - protein, 15 aa, synthetic construct
FTHGPSSMPLHPRPF

SEQ ID NO: 3680 - protein, 15 aa, synthetic construct
FWAAPAYGASTMPGW

SEQ ID NO: 3681 - protein, 15 aa, synthetic construct
GAGAGGGGRTGGRGP

SEQ ID NO: 3682 - protein, 15 aa, synthetic construct
GCGAWAARLAARAPA

SEQ ID NO: 3683 - protein, 15 aa, synthetic construct
GCLRDRESRSCCFRH

SEQ ID NO: 3684 - protein, 15 aa, synthetic construct
GEKNEPRAAGAASVP

SEQ ID NO: 3685 - protein, 15 aa, synthetic construct
GGGGPAPELLGPLLA

SEQ ID NO: 3686 - protein, 15 aa, synthetic construct
GHSVRHGEGAEAPAG

SEQ ID NO: 3687 - protein, 15 aa, synthetic construct
GLGRGPCGRPMRAGA

SEQ ID NO: 3688 - protein, 15 aa, synthetic construct
GMSLLFPGISAPGCK

SEQ ID NO: 3689 - protein, 15 aa, synthetic construct
GQLLGHRGPAVRAAQ

SEQ ID NO: 3690 - protein, 15 aa, synthetic construct
GREPGACPRAPGTRA

SEQ ID NO: 3691 - protein, 15 aa, synthetic construct
GRHQDGHLRQERPEA

SEQ ID NO: 3692 - protein, 15 aa, synthetic construct
GRPLRGLGAAGGGRA

SEQ ID NO: 3693 - protein, 15 aa, synthetic construct
GYQEYRFPPPGFPSF

SEQ ID NO: 3694 - protein, 15 aa, synthetic construct
HAEPGWLRGGGGRPE

SEQ ID NO: 3695 - protein, 15 aa, synthetic construct
HVPQVRGHHGVQRRG

SEQ ID NO: 3696 - protein, 15 aa, synthetic construct
ILMSHTQTWRLLPSS

SEQ ID NO: 3697 - protein, 15 aa, synthetic construct
IVDIATIVTAMQKNG

SEQ ID NO: 3698 - protein, 15 aa, synthetic construct
KADEPGREWRRRGRQ

SEQ ID NO: 3699 - protein, 15 aa, synthetic construct
KETNIRDLERKGRVG

SEQ ID NO: 3700 - protein, 15 aa, synthetic construct
LGLLPPGSFHGHCLP

SEQ ID NO: 3701 - protein, 15 aa, synthetic construct
LHQASAGPAPKGVPL

SEQ ID NO: 3702 - protein, 15 aa, synthetic construct
LLPALRATARLRQVL

SEQ ID NO: 3703 - protein, 15 aa, synthetic construct
NPGTAGLPAQGAALG

SEQ ID NO: 3704 - protein, 15 aa, synthetic construct
PHAARPEARPAADAP

SEQ ID NO: 3705 - protein, 15 aa, synthetic construct
PPGVVRGAAGPGRGP

SEQ ID NO: 3706 - protein, 15 aa, synthetic construct
PRPPLPQQARHRAHR

SEQ ID NO: 3707 - protein, 15 aa, synthetic construct
PRSFFRDRRQSSAVA

SEQ ID NO: 3708 - protein, 15 aa, synthetic construct
QPASSHHGSRGAADD

SEQ ID NO: 3709 - protein, 15 aa, synthetic construct
QQWSSLGRFCSSMST

SEQ ID NO: 3710 - protein, 15 aa, synthetic construct
RGAGRAEQRNRPCLR

SEQ ID NO: 3711 - protein, 15 aa, synthetic construct
RGGTCAPRTSTQSAQ

SEQ ID NO: 3712 - protein, 15 aa, synthetic construct
RLGLEAGRPPPAAAT

SEQ ID NO: 3713 - protein, 15 aa, synthetic construct
RQFHLGKRRARLGGG

SEQ ID NO: 3714 - protein, 15 aa, synthetic construct
RQPRHPGAAERRQVP

SEQ ID NO: 3715 - protein, 15 aa, synthetic construct
RRRGAAPGAGGRGLS

SEQ ID NO: 3716 - protein, 15 aa, synthetic construct
RRSLRPTTCSATRAS

SEQ ID NO: 3717 - protein, 15 aa, synthetic construct
RSRNPNPNPNPNPSP

SEQ ID NO: 3718 - protein, 15 aa, synthetic construct
SERLRGWGCSGRCGS

SEQ ID NO: 3719 - protein, 15 aa, synthetic construct
SGHWRGQVRRPRLPP

SEQ ID NO: 3720 - protein, 15 aa, synthetic construct
SSGDRPPPAGRPGPP

SEQ ID NO: 3721 - protein, 15 aa, synthetic construct
SSSVTAGTRTRGRCW

SEQ ID NO: 3722 - protein, 15 aa, synthetic construct
SSSWDSSDNPNIQLY

SEQ ID NO: 3723 - protein, 15 aa, synthetic construct
TPQPGRPGRGILPGA

SEQ ID NO: 3724 - protein, 15 aa, synthetic construct
VISKWHQPNSSFIHP

SEQ ID NO: 3725 - protein, 15 aa, synthetic construct
VRVASSRFQPLCVRP

SEQ ID NO: 3726 - protein, 15 aa, synthetic construct
WLPRLDSPRQGGQDC

SEQ ID NO: 3727 - protein, 15 aa, synthetic construct
WNVSTISWDFCSWLQ

SEQ ID NO: 3728 - protein, 15 aa, synthetic construct
WPLGASCWLGRGISP

SEQ ID NO: 3729 - protein, 15 aa, synthetic construct
WSATGTPGSCCARCS

SEQ ID NO: 3730 - protein, 15 aa, synthetic construct
AAEAVEAAEAAGVAA

SEQ ID NO: 3731 - protein, 15 aa, synthetic construct
AAGAGAGAAGSAGQA

SEQ ID NO: 3732 - protein, 15 aa, synthetic construct
ACAAYAAAAGRTPCV

SEQ ID NO: 3733 - protein, 15 aa, synthetic construct
AGAARAAAGRDPGCG

SEQ ID NO: 3734 - protein, 15 aa, synthetic construct
AGPRHSRGDHGGERL

SEQ ID NO: 3735 - protein, 15 aa, synthetic construct
APLPGRSGAAGLPPG

SEQ ID NO: 3736 - protein, 15 aa, synthetic construct
ARAGAQRCGTARPRA

SEQ ID NO: 3737 - protein, 15 aa, synthetic construct
AWRNPESWRRPRRGR

SEQ ID NO: 3738 - protein, 15 aa, synthetic construct
EMLLSLPALHLQTSE

SEQ ID NO: 3739 - protein, 15 aa, synthetic construct
FVRAARRRGGRARLG

SEQ ID NO: 3740 - protein, 15 aa, synthetic construct
GAFPPPRPAGSGGPT

SEQ ID NO: 3741 - protein, 15 aa, synthetic construct
GAGLGAGGGAAVVPA

SEQ ID NO: 3742 - protein, 15 aa, synthetic construct
GCRCAPRRISLPAAS

SEQ ID NO: 3743 - protein, 15 aa, synthetic construct
GCRSRLGGSRFSPSP

SEQ ID NO: 3744 - protein, 15 aa, synthetic construct
GPGGQPEPDPDGAAG

SEQ ID NO: 3745 - protein, 15 aa, synthetic construct
GRGAVRLLVPPGRGP

SEQ ID NO: 3746 - protein, 15 aa, synthetic construct
GRGRRGRAEEGAGAA

SEQ ID NO: 3747 - protein, 15 aa, synthetic construct
GRTAARKPRNPNTRP

SEQ ID NO: 3748 - protein, 15 aa, synthetic construct
GSAGGGGGGEAAARP

SEQ ID NO: 3749 - protein, 15 aa, synthetic construct
GSATFSRKDGRPSRP

SEQ ID NO: 3750 - protein, 15 aa, synthetic construct
GTTPARPRSRRWRTR

SEQ ID NO: 3751 - protein, 15 aa, synthetic construct
LAAGAAAADRLAVDL

SEQ ID NO: 3752 - protein, 15 aa, synthetic construct
LPIRANLVRRLRCRS

SEQ ID NO: 3753 - protein, 15 aa, synthetic construct
MAPRLTARMPRPPTG

SEQ ID NO: 3754 - protein, 15 aa, synthetic construct
RGAGAAAAGDQAGAP

SEQ ID NO: 3755 - protein, 15 aa, synthetic construct
RGCPRALREPAHLGR

SEQ ID NO: 3756 - protein, 15 aa, synthetic construct
RPAPRTHRSRRRTRP

SEQ ID NO: 3757 - protein, 15 aa, synthetic construct
RQAGAAAAGGGGDRL

SEQ ID NO: 3758 - protein, 15 aa, synthetic construct
RVRRVRPGQRREPLL

SEQ ID NO: 3759 - protein, 15 aa, synthetic construct
SGRESGSWLHHSGAR

SEQ ID NO: 3760 - protein, 15 aa, synthetic construct
SLGAPGSRPVEAPAA

SEQ ID NO: 3761 - protein, 15 aa, synthetic construct
SRGLRRGRRRRRLAA

SEQ ID NO: 3762 - protein, 15 aa, synthetic construct
SRLPARATRACTSRT

SEQ ID NO: 3763 - protein, 15 aa, synthetic construct
SSRRLLCETKDSSLF

SEQ ID NO: 3764 - protein, 15 aa, synthetic construct
SSRSPQRAACPGPGP

SEQ ID NO: 3765 - protein, 15 aa, synthetic construct
TATGRGSPRAASPRA

SEQ ID NO: 3766 - protein, 15 aa, synthetic construct
TCSASPARTAAGTPS

SEQ ID NO: 3767 - protein, 15 aa, synthetic construct
TRFSWRRAARWRRSR

SEQ ID NO: 3768 - protein, 15 aa, synthetic construct
TTSASPRDPQGPPRH

SEQ ID NO: 3769 - protein, 15 aa, synthetic construct
WGRLMWTRSSFSIKK

SEQ ID NO: 3770 - protein, 15 aa, synthetic construct
WLGPRSSASWPHCCC

SEQ ID NO: 3771 - protein, 15 aa, synthetic construct
WPITRAPRPPPAPTA

SEQ ID NO: 3772 - protein, 15 aa, synthetic construct
WRRAAAKRRRQRLRR

SEQ ID NO: 3773 - protein, 15 aa, synthetic construct
WRRRRFRWRRRRLQK

SEQ ID NO: 3774 - protein, 15 aa, synthetic construct
WRRYWRRRQCEPGSC

SEQ ID NO: 3775 - protein, 15 aa, synthetic construct
WSWRYRTRRRALRRG

SEQ ID NO: 3776 - protein, 15 aa, synthetic construct
WVCATVCGRCFSGAQ

SEQ ID NO: 3777 - protein, 15 aa, synthetic construct
AADAQGLGCPRKPRR

SEQ ID NO: 3778 - protein, 15 aa, synthetic construct
AAGHDRPPAQPKVLR

SEQ ID NO: 3779 - protein, 15 aa, synthetic construct
AALKLRAGAGARGGS

SEQ ID NO: 3780 - protein, 15 aa, synthetic construct
AAPSLAGPVSGKLRG

SEQ ID NO: 3781 - protein, 15 aa, synthetic construct
AGRREDAPTPPSKRR

SEQ ID NO: 3782 - protein, 15 aa, synthetic construct
AGSTSVPWPGALLPS

SEQ ID NO: 3783 - protein, 15 aa, synthetic construct
ALGGAGQGHPAPGAA

SEQ ID NO: 3784 - protein, 15 aa, synthetic construct
AMTKPQTQFLSSKTR

SEQ ID NO: 3785 - protein, 15 aa, synthetic construct
APAAGAVPGAVPVCG

SEQ ID NO: 3786 - protein, 15 aa, synthetic construct
APAAPAPAAAPGACG

SEQ ID NO: 3787 - protein, 15 aa, synthetic construct
APAPSSMDRRWTCSS

SEQ ID NO: 3788 - protein, 15 aa, synthetic construct
APAQHRVGAAQPRES

SEQ ID NO: 3789 - protein, 15 aa, synthetic construct
APEGGELGRGRGRRG

SEQ ID NO: 3790 - protein, 15 aa, synthetic construct
APGPPWHHLGRGVAT

SEQ ID NO: 3791 - protein, 15 aa, synthetic construct
APHRCGPQARLQGCP

SEQ ID NO: 3792 - protein, 15 aa, synthetic construct
APPAGPARCPRRPHR

SEQ ID NO: 3793 - protein, 15 aa, synthetic construct
APPAPRSTCSSISSS

SEQ ID NO: 3794 - protein, 15 aa, synthetic construct
APPEAPGAASLPTFS

SEQ ID NO: 3795 - protein, 15 aa, synthetic construct
APPLPVPRAPHHLPL

SEQ ID NO: 3796 - protein, 15 aa, synthetic construct
APPPAQQGKAKAKAA

SEQ ID NO: 3797 - protein, 15 aa, synthetic construct
APPPARRALPGGSRA

SEQ ID NO: 3798 - protein, 15 aa, synthetic construct
APPPVAGPGLAAAGA

SEQ ID NO: 3799 - protein, 15 aa, synthetic construct
APPRSPPTTCAHPAW

SEQ ID NO: 3800 - protein, 15 aa, synthetic construct
APQPGDRPQRTVREA

SEQ ID NO: 3801 - protein, 15 aa, synthetic construct
APQPRDAPQTRQVHP

SEQ ID NO: 3802 - protein, 15 aa, synthetic construct
APRGERAGGVPAPPP

SEQ ID NO: 3803 - protein, 15 aa, synthetic construct
ARATRRAGPAPCAAA

SEQ ID NO: 3804 - protein, 15 aa, synthetic construct
ARKRRGRRRGGRKRR

SEQ ID NO: 3805 - protein, 15 aa, synthetic construct
ATGPTQIPGAGKGRR

SEQ ID NO: 3806 - protein, 15 aa, synthetic construct
AVRQRLPPAARPARA

SEQ ID NO: 3807 - protein, 15 aa, synthetic construct
CGEPPGWRTSPRRKR

SEQ ID NO: 3808 - protein, 15 aa, synthetic construct
CGREVTINPRSKQRM

SEQ ID NO: 3809 - protein, 15 aa, synthetic construct
CLTLFGFSPLRQKLR

SEQ ID NO: 3810 - protein, 15 aa, synthetic construct
CPPAPRRAARGRRRR

SEQ ID NO: 3811 - protein, 15 aa, synthetic construct
CPPRNRLRPGAAKRR

SEQ ID NO: 3812 - protein, 15 aa, synthetic construct
CQAVIGGKQKPKERT

SEQ ID NO: 3813 - protein, 15 aa, synthetic construct
CRAKPQKPSLLQSRS

SEQ ID NO: 3814 - protein, 15 aa, synthetic construct
CRGATPGSASAKRRA

SEQ ID NO: 3815 - protein, 15 aa, synthetic construct
CRGRSQERHWGSRKR

SEQ ID NO: 3816 - protein, 15 aa, synthetic construct
CRPSRSLRSSPISRR

SEQ ID NO: 3817 - protein, 15 aa, synthetic construct
CSGFRSRGPGRRKRR

SEQ ID NO: 3818 - protein, 15 aa, synthetic construct
CTPRGARVRPCPPTA

SEQ ID NO: 3819 - protein, 15 aa, synthetic construct
CVKPRRLEKKGKWRR

SEQ ID NO: 3820 - protein, 15 aa, synthetic construct
DKAPSTNNHRLPSTS

SEQ ID NO: 3821 - protein, 15 aa, synthetic construct
DSCPSVAVPRRRRPA

SEQ ID NO: 3822 - protein, 15 aa, synthetic construct
DVRPASGRRVRRGDC

SEQ ID NO: 3823 - protein, 15 aa, synthetic construct
ERDLPEPQRLGGGGR

SEQ ID NO: 3824 - protein, 15 aa, synthetic construct
GAAAPAPAAPAAPRP

SEQ ID NO: 3825 - protein, 15 aa, synthetic construct
GAAGPGPGRRQGAAG

SEQ ID NO: 3826 - protein, 15 aa, synthetic construct
GAAGRCLQRRLRRGP

SEQ ID NO: 3827 - protein, 15 aa, synthetic construct
GAAHPGPWEPAARLG

SEQ ID NO: 3828 - protein, 15 aa, synthetic construct
GAAPAATSQLSAASR

SEQ ID NO: 3829 - protein, 15 aa, synthetic construct
GAAPGAAPGPRTRGG

SEQ ID NO: 3830 - protein, 15 aa, synthetic construct
GAAQPPGPAAPVLDR

SEQ ID NO: 3831 - protein, 15 aa, synthetic construct
GAASPELRAGPGAGW

SEQ ID NO: 3832 - protein, 15 aa, synthetic construct
GAFEPPAGAGPGPGR

SEQ ID NO: 3833 - protein, 15 aa, synthetic construct
GAPAFGAACTAGRLL

SEQ ID NO: 3834 - protein, 15 aa, synthetic construct
GAPAGAGAIQRRGRH

SEQ ID NO: 3835 - protein, 15 aa, synthetic construct
GAPAHGDTRRPPPPA

SEQ ID NO: 3836 - protein, 15 aa, synthetic construct
GAPAVRRDPAGGRAL

SEQ ID NO: 3837 - protein, 15 aa, synthetic construct
GAPLFAAVGPGRLLA

SEQ ID NO: 3838 - protein, 15 aa, synthetic construct
GAPPAAARLAPGPRG

SEQ ID NO: 3839 - protein, 15 aa, synthetic construct
GAPPAAASVLPVAAA

SEQ ID NO: 3840 - protein, 15 aa, synthetic construct
GAPPALLGRAGAGAT

SEQ ID NO: 3841 - protein, 15 aa, synthetic construct
GAPPAPWGPLAGYPC

SEQ ID NO: 3842 - protein, 15 aa, synthetic construct
GAPPARAAPRPPARW

SEQ ID NO: 3843 - protein, 15 aa, synthetic construct
GAPPGSEGLGEGEPG

SEQ ID NO: 3844 - protein, 15 aa, synthetic construct
GAPRSPGSRLGGSSQ

SEQ ID NO: 3845 - protein, 15 aa, synthetic construct
GAPTAPRPAQCLPGW

SEQ ID NO: 3846 - protein, 15 aa, synthetic construct
GCGRGGGHSADAWSR

SEQ ID NO: 3847 - protein, 15 aa, synthetic construct
GDPGRATRAAPAGRR

SEQ ID NO: 3848 - protein, 15 aa, synthetic construct
GERGDGRQQQQRKRR

SEQ ID NO: 3849 - protein, 15 aa, synthetic construct
GGAGGGGGRGGPTPG

SEQ ID NO: 3850 - protein, 15 aa, synthetic construct
GGGGGGGGGRGGSGK

SEQ ID NO: 3851 - protein, 15 aa, synthetic construct
GGLNLPEARKRKPRR

SEQ ID NO: 3852 - protein, 15 aa, synthetic construct
GGPERGGAARKGRAG

SEQ ID NO: 3853 - protein, 15 aa, synthetic construct
GGPGGFPVCGSKRRR

SEQ ID NO: 3854 - protein, 15 aa, synthetic construct
GGRAAGGPALGRPAE

SEQ ID NO: 3855 - protein, 15 aa, synthetic construct
GGRGGWRRGWWKARR

SEQ ID NO: 3856 - protein, 15 aa, synthetic construct
GLGSEARTRPPKGRR

SEQ ID NO: 3857 - protein, 15 aa, synthetic construct
GLSGPPRSSWRPGEI

SEQ ID NO: 3858 - protein, 15 aa, synthetic construct
GMGGKQGGPAEGKLR

SEQ ID NO: 3859 - protein, 15 aa, synthetic construct
GMLGLRKRKMLKKMR

SEQ ID NO: 3860 - protein, 15 aa, synthetic construct
GPAPPKEGKGGCQSL

SEQ ID NO: 3861 - protein, 15 aa, synthetic construct
GPGRPALGGRWRRRR

SEQ ID NO: 3862 - protein, 15 aa, synthetic construct
GPHSGPPGPAGIRRA

SEQ ID NO: 3863 - protein, 15 aa, synthetic construct
GPPGPFQRGGAGAGV

SEQ ID NO: 3864 - protein, 15 aa, synthetic construct
GPPRAGPSPASGAAA

SEQ ID NO: 3865 - protein, 15 aa, synthetic construct
GPQEGSARAGGGRRP

SEQ ID NO: 3866 - protein, 15 aa, synthetic construct
GPQPGGRARAVRQDP

SEQ ID NO: 3867 - protein, 15 aa, synthetic construct
GPRKYLQGRQDPGVG

SEQ ID NO: 3868 - protein, 15 aa, synthetic construct
GPRTRGLFPNCSAGT

SEQ ID NO: 3869 - protein, 15 aa, synthetic construct
GPVPQPRLGQRERGG

SEQ ID NO: 3870 - protein, 15 aa, synthetic construct
GRARAEPRGVGAAGR

SEQ ID NO: 3871 - protein, 15 aa, synthetic construct
GRRTESWTPRGKPRA

SEQ ID NO: 3872 - protein, 15 aa, synthetic construct
GTGGRAKDAYRIRRS

SEQ ID NO: 3873 - protein, 15 aa, synthetic construct
ICGAFLLLRDKRKRR

SEQ ID NO: 3874 - protein, 15 aa, synthetic construct
ISSWDFHKWHHCGGE

SEQ ID NO: 3875 - protein, 15 aa, synthetic construct
ITLMPRKEKMMEKER

SEQ ID NO: 3876 - protein, 15 aa, synthetic construct
KQLRGGAGGPQVPAG

SEQ ID NO: 3877 - protein, 15 aa, synthetic construct
KRAQMRRNHSKEKAR

SEQ ID NO: 3878 - protein, 15 aa, synthetic construct
KRAQMRRNHSKKKAR

SEQ ID NO: 3879 - protein, 15 aa, synthetic construct
LASPPRILGGGERPA

SEQ ID NO: 3880 - protein, 15 aa, synthetic construct
LASSGPNPPLNQKIR

SEQ ID NO: 3881 - protein, 15 aa, synthetic construct
LLSPAPRRLPSALRR

SEQ ID NO: 3882 - protein, 15 aa, synthetic construct
LPPARRSAARRRSPP

SEQ ID NO: 3883 - protein, 15 aa, synthetic construct
LPRGARLRARLLSAG

SEQ ID NO: 3884 - protein, 15 aa, synthetic construct
LPTRSPAPAWSAAET

SEQ ID NO: 3885 - protein, 15 aa, synthetic construct
LTPTLSLNTFIIVRR

SEQ ID NO: 3886 - protein, 15 aa, synthetic construct
MEERGGRRYKRKERS

SEQ ID NO: 3887 - protein, 15 aa, synthetic construct
PASVVMPHLPRIFRL

SEQ ID NO: 3888 - protein, 15 aa, synthetic construct
PDPSDGFPYNVQRHS

SEQ ID NO: 3889 - protein, 15 aa, synthetic construct
PGDPDPRPALCALPP

SEQ ID NO: 3890 - protein, 15 aa, synthetic construct
PGHPLRAGWRRKRRR

SEQ ID NO: 3891 - protein, 15 aa, synthetic construct
PKNAFQLNGRRKSRA

SEQ ID NO: 3892 - protein, 15 aa, synthetic construct
PPGGQLRAWGARAGT

SEQ ID NO: 3893 - protein, 15 aa, synthetic construct
PRASSWPLRRLAKAR

SEQ ID NO: 3894 - protein, 15 aa, synthetic construct
PRATAAAGLRRRKRR

SEQ ID NO: 3895 - protein, 15 aa, synthetic construct
PRGRTGTIYSHKARR

SEQ ID NO: 3896 - protein, 15 aa, synthetic construct
PTSGTNERTLMPKAR

SEQ ID NO: 3897 - protein, 15 aa, synthetic construct
PWADRLPLYPDLRAP

SEQ ID NO: 3898 - protein, 15 aa, synthetic construct
QEAGGVPVLPERTRG

SEQ ID NO: 3899 - protein, 15 aa, synthetic construct
QRARAAAHARPKRRA

SEQ ID NO: 3900 - protein, 15 aa, synthetic construct
REPPTAPGQSRQGVH

SEQ ID NO: 3901 - protein, 15 aa, synthetic construct
RGDRGAGEPERRKRR

SEQ ID NO: 3902 - protein, 15 aa, synthetic construct
RGPGSWRWHPGQKRR

SEQ ID NO: 3903 - protein, 15 aa, synthetic construct
RHPPQSGSSRRRKRR

SEQ ID NO: 3904 - protein, 15 aa, synthetic construct
RKGTGPQERAGGVRV

SEQ ID NO: 3905 - protein, 15 aa, synthetic construct
RLAPGPARGKGRRGG

SEQ ID NO: 3906 - protein, 15 aa, synthetic construct
RPASAGSCSSRAPGP

SEQ ID NO: 3907 - protein, 15 aa, synthetic construct
RPSRRRRRSGSRGSR

SEQ ID NO: 3908 - protein, 15 aa, synthetic construct
RQPAARSRCPLLKRR

SEQ ID NO: 3909 - protein, 15 aa, synthetic construct
RRAASRKSRWRSEKR

SEQ ID NO: 3910 - protein, 15 aa, synthetic construct
RRAESPLCGRKKRRG

SEQ ID NO: 3911 - protein, 15 aa, synthetic construct
RRASSWPLRRLGKAR

SEQ ID NO: 3912 - protein, 15 aa, synthetic construct
RRGLRSPPSPGKARG

SEQ ID NO: 3913 - protein, 15 aa, synthetic construct
RSASWRRHSGCIRRR

SEQ ID NO: 3914 - protein, 15 aa, synthetic construct
RSLCRGWNCIKIRRR

SEQ ID NO: 3915 - protein, 15 aa, synthetic construct
RWQGRGRGRQRHAEE

SEQ ID NO: 3916 - protein, 15 aa, synthetic construct
SAAAKRATPSTCTRC

SEQ ID NO: 3917 - protein, 15 aa, synthetic construct
SAARRWRDGAGRSRA

SEQ ID NO: 3918 - protein, 15 aa, synthetic construct
SARKRRGPEKRALGS

SEQ ID NO: 3919 - protein, 15 aa, synthetic construct
SCARAKRSGAARAVA

SEQ ID NO: 3920 - protein, 15 aa, synthetic construct
SEPARRARPHRTQPG

SEQ ID NO: 3921 - protein, 15 aa, synthetic construct
SEPSRRARRTACLWR

SEQ ID NO: 3922 - protein, 15 aa, synthetic construct
SGGRRWRGRSPRPRA

SEQ ID NO: 3923 - protein, 15 aa, synthetic construct
SGHDGPSCPPDPPPS

SEQ ID NO: 3924 - protein, 15 aa, synthetic construct
SGRPPGPAAGAKRRS

SEQ ID NO: 3925 - protein, 15 aa, synthetic construct
SHPRGVLPARGILLA

SEQ ID NO: 3926 - protein, 15 aa, synthetic construct
SKPRRATGRTAPTCS

SEQ ID NO: 3927 - protein, 15 aa, synthetic construct
SLGRRRGPRRVGAPT

SEQ ID NO: 3928 - protein, 15 aa, synthetic construct
SLPCQRSRRRGRRRR

SEQ ID NO: 3929 - protein, 15 aa, synthetic construct
SLRRSLRPRLSSWMS

SEQ ID NO: 3930 - protein, 15 aa, synthetic construct
SLSRRLRPLPAVLTL

SEQ ID NO: 3931 - protein, 15 aa, synthetic construct
SNPRRSRSAPGPQPW

SEQ ID NO: 3932 - protein, 15 aa, synthetic construct
SPAVAQFPQPPPSAA

SEQ ID NO: 3933 - protein, 15 aa, synthetic construct
SPQAFCPGHRLLHSL

SEQ ID NO: 3934 - protein, 15 aa, synthetic construct
SPRRCRAPRPPGGRT

SEQ ID NO: 3935 - protein, 15 aa, synthetic construct
SPRRGRLGRMPAPCP

SEQ ID NO: 3936 - protein, 15 aa, synthetic construct
SPRWRRPRGPGTPTT

SEQ ID NO: 3937 - protein, 15 aa, synthetic construct
SRARRARGCSSPWAA

SEQ ID NO: 3938 - protein, 15 aa, synthetic construct
SRPRRRRRDALRLRL

SEQ ID NO: 3939 - protein, 15 aa, synthetic construct
SSPRFRWRATCWCAP

SEQ ID NO: 3940 - protein, 15 aa, synthetic construct
SSSRTSQNRKRRKKR

SEQ ID NO: 3941 - protein, 15 aa, synthetic construct
SSTAVTSWCRRRTAT

SEQ ID NO: 3942 - protein, 15 aa, synthetic construct
SVQLARRCRAGRLHR

SEQ ID NO: 3943 - protein, 15 aa, synthetic construct
SVVGRRARAQPRQGE

SEQ ID NO: 3944 - protein, 15 aa, synthetic construct
TAAVVEVAAPPGPRF

SEQ ID NO: 3945 - protein, 15 aa, synthetic construct
TTKTTTTRARRRKRR

SEQ ID NO: 3946 - protein, 15 aa, synthetic construct
TTSLGGTSALGTKTR

SEQ ID NO: 3947 - protein, 15 aa, synthetic construct
VYFPQLLHLTGRKRR

SEQ ID NO: 3948 - protein, 15 aa, synthetic construct
WDSPTWKMMAQKRRS

SEQ ID NO: 3949 - protein, 15 aa, synthetic construct
WEQKGFVPRLLKSRR

SEQ ID NO: 3950 - protein, 15 aa, synthetic construct
WILGCLHLRSKIKRI

SEQ ID NO: 3951 - protein, 15 aa, synthetic construct
WKDPSLWPPIRGKRR

SEQ ID NO: 3952 - protein, 15 aa, synthetic construct
WLQESVRIPCSRSRR

SEQ ID NO: 3953 - protein, 15 aa, synthetic construct
WPLNASLHSRLKRRN

SEQ ID NO: 3954 - protein, 15 aa, synthetic construct
WPRRWGTIWSRRKLR

SEQ ID NO: 3955 - protein, 15 aa, synthetic construct
WPVSPKVSSSFCKLR

SEQ ID NO: 3956 - protein, 15 aa, synthetic construct
WQLQAASTDGGKTRT

SEQ ID NO: 3957 - protein, 15 aa, synthetic construct
WQMGQRPTPKGSKRR

SEQ ID NO: 3958 - protein, 15 aa, synthetic construct
WQPKVLCAASSIWRA

SEQ ID NO: 3959 - protein, 15 aa, synthetic construct
WRPGSGSRSMDFPKT

SEQ ID NO: 3960 - protein, 15 aa, synthetic construct
WRQRNRRRPQRSKSR

SEQ ID NO: 3961 - protein, 15 aa, synthetic construct
WRRSQIRLRRRKRRR

SEQ ID NO: 3962 - protein, 15 aa, synthetic construct
WRRYCGEATQGRRRA

SEQ ID NO: 3963 - protein, 15 aa, synthetic construct
WRTGRRETRSLKSRS

SEQ ID NO: 3964 - protein, 15 aa, synthetic construct
WTQSWQRCAPCKLRS

SEQ ID NO: 3965 - protein, 15 aa, synthetic construct
WVNPQEAILTPKRRY

SEQ ID NO: 3966 - protein, 15 aa, synthetic construct
YRHPRALRPGLRVRR

SEQ ID NO: 3967 - protein, 15 aa, synthetic construct
AAAAATRLLPGLPRA

SEQ ID NO: 3968 - protein, 15 aa, synthetic construct
AAAAEATPLAAVALA

SEQ ID NO: 3969 - protein, 15 aa, synthetic construct
AAAGAAGGDPGLGSS

SEQ ID NO: 3970 - protein, 15 aa, synthetic construct
AALPAENAAADELVR

SEQ ID NO: 3971 - protein, 15 aa, synthetic construct
AARPCAGGVGAGLRS

SEQ ID NO: 3972 - protein, 15 aa, synthetic construct
AARRARARRGTQGGP

SEQ ID NO: 3973 - protein, 15 aa, synthetic construct
AARRARLSACRGPAA

SEQ ID NO: 3974 - protein, 15 aa, synthetic construct
AATKAAPKASRRRRL

SEQ ID NO: 3975 - protein, 15 aa, synthetic construct
AAVCQPVPAPAVAPV

SEQ ID NO: 3976 - protein, 15 aa, synthetic construct
AAVGDTAGGDVGAAD

SEQ ID NO: 3977 - protein, 15 aa, synthetic construct
AAVPRSAAGGAPQPP

SEQ ID NO: 3978 - protein, 15 aa, synthetic construct
ADRPLLLLLQRLRGG

SEQ ID NO: 3979 - protein, 15 aa, synthetic construct
AGGAAAACRRRRARV

SEQ ID NO: 3980 - protein, 15 aa, synthetic construct
AGLGAPGCGTPAAPK

SEQ ID NO: 3981 - protein, 15 aa, synthetic construct
AGPAAPSRAGHPPRP

SEQ ID NO: 3982 - protein, 15 aa, synthetic construct
AGPAGRALRPRPASG

SEQ ID NO: 3983 - protein, 15 aa, synthetic construct
AGWPWRRARACATPR

SEQ ID NO: 3984 - protein, 15 aa, synthetic construct
AQAGGRPEGVPRRGL

SEQ ID NO: 3985 - protein, 15 aa, synthetic construct
ARHEPGRGGGGAGRG

SEQ ID NO: 3986 - protein, 15 aa, synthetic construct
ARLRVRSGRAAARGG

SEQ ID NO: 3987 - protein, 15 aa, synthetic construct
ARPGRGASGASSSRG

SEQ ID NO: 3988 - protein, 15 aa, synthetic construct
ARRARLSPGGRAGFQ

SEQ ID NO: 3989 - protein, 15 aa, synthetic construct
ARRLRAARRAAGTRG

SEQ ID NO: 3990 - protein, 15 aa, synthetic construct
ARRLRPARRPGSRRS

SEQ ID NO: 3991 - protein, 15 aa, synthetic construct
ARRVRGQRRLALPAH

SEQ ID NO: 3992 - protein, 15 aa, synthetic construct
ARRVRGRRAGGVGGG

SEQ ID NO: 3993 - protein, 15 aa, synthetic construct
AVRGSVPRAARAAGP

SEQ ID NO: 3994 - protein, 15 aa, synthetic construct
CCQIISHPSQETLNS

SEQ ID NO: 3995 - protein, 15 aa, synthetic construct
CGKAMRRRSRSRAAK

SEQ ID NO: 3996 - protein, 15 aa, synthetic construct
DGLFRPANGGHRADR

SEQ ID NO: 3997 - protein, 15 aa, synthetic construct
DGSQKYPSQISGQVH

SEQ ID NO: 3998 - protein, 15 aa, synthetic construct
DRRRRRHPPEPRVGT

SEQ ID NO: 3999 - protein, 15 aa, synthetic construct
EAAGPLGSARRERRG

SEQ ID NO: 4000 - protein, 15 aa, synthetic construct
EALRDCPVSPRASSC

SEQ ID NO: 4001 - protein, 15 aa, synthetic construct
ERLPAERHPHRRGAA

SEQ ID NO: 4002 - protein, 15 aa, synthetic construct
GAALPHHRRQPAQVL

SEQ ID NO: 4003 - protein, 15 aa, synthetic construct
GAALPPPAGRGEAAA

SEQ ID NO: 4004 - protein, 15 aa, synthetic construct
GAAVPAAVRLLRAAG

SEQ ID NO: 4005 - protein, 15 aa, synthetic construct
GAAVPGLAAELGGNQ

SEQ ID NO: 4006 - protein, 15 aa, synthetic construct
GAAVPRGGPGPQGRA

SEQ ID NO: 4007 - protein, 15 aa, synthetic construct
GAAVPRREGHLRAGP

SEQ ID NO: 4008 - protein, 15 aa, synthetic construct
GALPAALPGSRPGAP

SEQ ID NO: 4009 - protein, 15 aa, synthetic construct
GALPSQGPLHPAAGR

SEQ ID NO: 4010 - protein, 15 aa, synthetic construct
GARAGGSEAASTAEA

SEQ ID NO: 4011 - protein, 15 aa, synthetic construct
GARLPTEAHPQGVHV

SEQ ID NO: 4012 - protein, 15 aa, synthetic construct
GATPTAVGTASGTAS

SEQ ID NO: 4013 - protein, 15 aa, synthetic construct
GATVPGPAAEAAAQL

SEQ ID NO: 4014 - protein, 15 aa, synthetic construct
GAVPRLHAAAGAGGH

SEQ ID NO: 4015 - protein, 15 aa, synthetic construct
GEQPREPAAARTRGG

SEQ ID NO: 4016 - protein, 15 aa, synthetic construct
GGAGGSGAAAAAAAA

SEQ ID NO: 4017 - protein, 15 aa, synthetic construct
GGCGGGGGCGGGSCS

SEQ ID NO: 4018 - protein, 15 aa, synthetic construct
GGGGARGGADGARAH

SEQ ID NO: 4019 - protein, 15 aa, synthetic construct
GGGGYAGRRRGALGG

SEQ ID NO: 4020 - protein, 15 aa, synthetic construct
GLGGAPDRLAGPGAE

SEQ ID NO: 4021 - protein, 15 aa, synthetic construct
GLRPQHPCLAERRDL

SEQ ID NO: 4022 - protein, 15 aa, synthetic construct
GPARGLRALSRGPPA

SEQ ID NO: 4023 - protein, 15 aa, synthetic construct
GPGGLPCPPLVQDLL

SEQ ID NO: 4024 - protein, 15 aa, synthetic construct
GPLRGPAGARALAAP

SEQ ID NO: 4025 - protein, 15 aa, synthetic construct
GQRLLPQLVRGRAAR

SEQ ID NO: 4026 - protein, 15 aa, synthetic construct
GRASVRDRFFAGRAT

SEQ ID NO: 4027 - protein, 15 aa, synthetic construct
GRGAGPGGARSPRRP

SEQ ID NO: 4028 - protein, 15 aa, synthetic construct
GRLALFAEPAGVLRL

SEQ ID NO: 4029 - protein, 15 aa, synthetic construct
GWAAGRAAGLVPPPV

SEQ ID NO: 4030 - protein, 15 aa, synthetic construct
GWQTRGHGWEQARGA

SEQ ID NO: 4031 - protein, 15 aa, synthetic construct
KGLSWHQASFKPIDG

SEQ ID NO: 4032 - protein, 15 aa, synthetic construct
KPPGLWAQHGGSDGA

SEQ ID NO: 4033 - protein, 15 aa, synthetic construct
LHRWCASRPHSSSGA

SEQ ID NO: 4034 - protein, 15 aa, synthetic construct
LPGLGRVQLAPPDHQ

SEQ ID NO: 4035 - protein, 15 aa, synthetic construct
LRRGGAPRRLPGAGA

SEQ ID NO: 4036 - protein, 15 aa, synthetic construct
PALRGGLRDLDAAVL

SEQ ID NO: 4037 - protein, 15 aa, synthetic construct
PQRSPRPQGPHRAGQ

SEQ ID NO: 4038 - protein, 15 aa, synthetic construct
PWRAPRASRSRRWAT

SEQ ID NO: 4039 - protein, 15 aa, synthetic construct
REPRARRSSWRARES

SEQ ID NO: 4040 - protein, 15 aa, synthetic construct
RGGGRAGAGGAAGRG

SEQ ID NO: 4041 - protein, 15 aa, synthetic construct
RPAAAATAATALATW

SEQ ID NO: 4042 - protein, 15 aa, synthetic construct
RRARVRATRSACCRP

SEQ ID NO: 4043 - protein, 15 aa, synthetic construct
RRQQPSAAPRGRRLL

SEQ ID NO: 4044 - protein, 15 aa, synthetic construct
RRRARLSVPPRGAQR

SEQ ID NO: 4045 - protein, 15 aa, synthetic construct
RSRPATPAAATAPQT

SEQ ID NO: 4046 - protein, 15 aa, synthetic construct
RTTAARGCGRSRCPS

SEQ ID NO: 4047 - protein, 15 aa, synthetic construct
RVAGPGGTPARPLRP

SEQ ID NO: 4048 - protein, 15 aa, synthetic construct
SAALPRVAQPPPRAG

SEQ ID NO: 4049 - protein, 15 aa, synthetic construct
SAPEAAVAPALGAAA

SEQ ID NO: 4050 - protein, 15 aa, synthetic construct
SAPEAAVAPALGEAV

SEQ ID NO: 4051 - protein, 15 aa, synthetic construct
SAVTTVPHPATFLSP

SEQ ID NO: 4052 - protein, 15 aa, synthetic construct
SCPPTGPRCTSPRRS

SEQ ID NO: 4053 - protein, 15 aa, synthetic construct
SSPSSTTGASACSPA

SEQ ID NO: 4054 - protein, 15 aa, synthetic construct
SSRAEGPGGLVAQPL

SEQ ID NO: 4055 - protein, 15 aa, synthetic construct
STRSAPSAATPSPPS

SEQ ID NO: 4056 - protein, 15 aa, synthetic construct
STTPYPRRPNTAPSW

SEQ ID NO: 4057 - protein, 15 aa, synthetic construct
SVSGPARAPAPAAAR

SEQ ID NO: 4058 - protein, 15 aa, synthetic construct
TWAPASTRSWGPTAP

SEQ ID NO: 4059 - protein, 15 aa, synthetic construct
WDRQKLGAAGPPRPY

SEQ ID NO: 4060 - protein, 15 aa, synthetic construct
WLAPRCWRSAPPARS

SEQ ID NO: 4061 - protein, 15 aa, synthetic construct
WMANKGAWMGASPRG

SEQ ID NO: 4062 - protein, 15 aa, synthetic construct
WPGGGAAPASLCSWC

SEQ ID NO: 4063 - protein, 15 aa, synthetic construct
WVRSTKLPWRNTWRR

SEQ ID NO: 4064 - protein, 15 aa, synthetic construct
AARSVLAVRIQGGRR

SEQ ID NO: 4065 - protein, 15 aa, synthetic construct
ACSLSPGHSLSALPI

SEQ ID NO: 4066 - protein, 15 aa, synthetic construct
CPGPGTRSVTRRCSC

SEQ ID NO: 4067 - protein, 15 aa, synthetic construct
CSGLGPPCCACCWRR

SEQ ID NO: 4068 - protein, 15 aa, synthetic construct
CSQQFPFATQLPWLR

SEQ ID NO: 4069 - protein, 15 aa, synthetic construct
CSRCTSPCCAAREPP

SEQ ID NO: 4070 - protein, 15 aa, synthetic construct
DPNISVRIYPTIPLA

SEQ ID NO: 4071 - protein, 15 aa, synthetic construct
GCPGLPRVPGEALSR

SEQ ID NO: 4072 - protein, 15 aa, synthetic construct
GETTAKPKHTGFHTL

SEQ ID NO: 4073 - protein, 15 aa, synthetic construct
GGGAAGRREPSGLRL

SEQ ID NO: 4074 - protein, 15 aa, synthetic construct
GLGDLSADVPVAQFQ

SEQ ID NO: 4075 - protein, 15 aa, synthetic construct
GPKAQGMPRYKQDSS

SEQ ID NO: 4076 - protein, 15 aa, synthetic construct
GRARPPRRLRPGHPR

SEQ ID NO: 4077 - protein, 15 aa, synthetic construct
GRRSQAPKQHRKETP

SEQ ID NO: 4078 - protein, 15 aa, synthetic construct
GRSSPEERDRIGQCL

SEQ ID NO: 4079 - protein, 15 aa, synthetic construct
GSAAREAGRREPVPA

SEQ ID NO: 4080 - protein, 15 aa, synthetic construct
KRQGRGGGRRPRGTA

SEQ ID NO: 4081 - protein, 15 aa, synthetic construct
LADRAALRLRLLRQP

SEQ ID NO: 4082 - protein, 15 aa, synthetic construct
PPLLRELTPRSPRPP

SEQ ID NO: 4083 - protein, 15 aa, synthetic construct
QVGASRTPAPRLVPE

SEQ ID NO: 4084 - protein, 15 aa, synthetic construct
RGAGATRVARPARAE

SEQ ID NO: 4085 - protein, 15 aa, synthetic construct
RGGRGRGVRGDGPHH

SEQ ID NO: 4086 - protein, 15 aa, synthetic construct
RHLRPETHQAGRLRK

SEQ ID NO: 4087 - protein, 15 aa, synthetic construct
RWGRVGRQPRGWFRR

SEQ ID NO: 4088 - protein, 15 aa, synthetic construct
SGARGPGLEETGGAG

SEQ ID NO: 4089 - protein, 15 aa, synthetic construct
SLHWPGRRGQRGRRL

SEQ ID NO: 4090 - protein, 15 aa, synthetic construct
VPAAHLEFQPPASGR

SEQ ID NO: 4091 - protein, 15 aa, synthetic construct
WCAWRPSCCCCWGCC

SEQ ID NO: 4092 - protein, 15 aa, synthetic construct
WKKEPGTETTPKRNT

SEQ ID NO: 4093 - protein, 15 aa, synthetic construct
WPGSATPPPSAGPPT

SEQ ID NO: 4094 - protein, 15 aa, synthetic construct
WRRPEQRWSRPGRPN

SEQ ID NO: 4095 - protein, 15 aa, synthetic construct
WSRPGPVASARRGRS

SEQ ID NO: 4096 - protein, 15 aa, synthetic construct
WSRPRASSAAAPRGP

SEQ ID NO: 4097 - protein, 15 aa, synthetic construct
WVSRASKSSWRSAVP

SEQ ID NO: 4098 - protein, 15 aa, synthetic construct
AAAACVGGGELSSVV

SEQ ID NO: 4099 - protein, 15 aa, synthetic construct
ARALKVRSCPEERLQ

SEQ ID NO: 4100 - protein, 15 aa, synthetic construct
ARARRGARGHGGASG

SEQ ID NO: 4101 - protein, 15 aa, synthetic construct
ARLLRAGCHRGGRGE

SEQ ID NO: 4102 - protein, 15 aa, synthetic construct
ARLRRQPLGHRAGTG

SEQ ID NO: 4103 - protein, 15 aa, synthetic construct
ARRARGRPRPAGPRP

SEQ ID NO: 4104 - protein, 15 aa, synthetic construct
ARRRRPGQAVPAVGA

SEQ ID NO: 4105 - protein, 15 aa, synthetic construct
ARRRRRRERERCGRR

SEQ ID NO: 4106 - protein, 15 aa, synthetic construct
ARRSRARAGARGGGG

SEQ ID NO: 4107 - protein, 15 aa, synthetic construct
ARRSRSTARAAGPGT

SEQ ID NO: 4108 - protein, 15 aa, synthetic construct
ARRTRTPAWMNLTSI

SEQ ID NO: 4109 - protein, 15 aa, synthetic construct
AVCAGPSGVPCWEDT

SEQ ID NO: 4110 - protein, 15 aa, synthetic construct
DHRGGFGISPGRPEG

SEQ ID NO: 4111 - protein, 15 aa, synthetic construct
GGPEAAGLAEVPGHG

SEQ ID NO: 4112 - protein, 15 aa, synthetic construct
GTAGSLQNQGEGTDQ

SEQ ID NO: 4113 - protein, 15 aa, synthetic construct
HRAGPRAGAGGAGAA

SEQ ID NO: 4114 - protein, 15 aa, synthetic construct
PSGARARWASSCLHP

SEQ ID NO: 4115 - protein, 15 aa, synthetic construct
RGSQLRRAGAHHLGP

SEQ ID NO: 4116 - protein, 15 aa, synthetic construct
RPARSRSRTSTTSRR

SEQ ID NO: 4117 - protein, 15 aa, synthetic construct
RWRRRTPGGRPRPAG

SEQ ID NO: 4118 - protein, 15 aa, synthetic construct
WPPMWDRCFNIGSDL

SEQ ID NO: 4119 - protein, 15 aa, synthetic construct
WRRTARAASPTCPGP

SEQ ID NO: 4120 - protein, 15 aa, synthetic construct
APGPRPGPGGAQGYC

SEQ ID NO: 4121 - protein, 15 aa, synthetic construct
AQHGLQPGDAPENEQ

SEQ ID NO: 4122 - protein, 15 aa, synthetic construct
CPVVPAPVLTATLPF

SEQ ID NO: 4123 - protein, 15 aa, synthetic construct
CPWAWRSRAPRWPCW

SEQ ID NO: 4124 - protein, 15 aa, synthetic construct
CQLPRAGPVPGTATT

SEQ ID NO: 4125 - protein, 15 aa, synthetic construct
DRPQQDDHQLGPLWH

SEQ ID NO: 4126 - protein, 15 aa, synthetic construct
DSEWKKFCWKHSAGK

SEQ ID NO: 4127 - protein, 15 aa, synthetic construct
EAVEMAAAAHHATED

SEQ ID NO: 4128 - protein, 15 aa, synthetic construct
EAVKAETGRQRALPT

SEQ ID NO: 4129 - protein, 15 aa, synthetic construct
EAVSPIPDQRGSFRA

SEQ ID NO: 4130 - protein, 15 aa, synthetic construct
EEVLSDAQVGGRQRR

SEQ ID NO: 4131 - protein, 15 aa, synthetic construct
EHRNVSDPHGGGGLP

SEQ ID NO: 4132 - protein, 15 aa, synthetic construct
ENVFKVSITTSTNFS

SEQ ID NO: 4133 - protein, 15 aa, synthetic construct
EVQTQPDTDLRPRGV

SEQ ID NO: 4134 - protein, 15 aa, synthetic construct
GAARSPAGRRRCRRR

SEQ ID NO: 4135 - protein, 15 aa, synthetic construct
GERRKRGEGDPPAGG

SEQ ID NO: 4136 - protein, 15 aa, synthetic construct
GLSGVPRAHAPGPPP

SEQ ID NO: 4137 - protein, 15 aa, synthetic construct
GPCTAPDPCCPRLFH

SEQ ID NO: 4138 - protein, 15 aa, synthetic construct
GQRPGGDQVPGERPW

SEQ ID NO: 4139 - protein, 15 aa, synthetic construct
GSHQEGGGDYHNYER

SEQ ID NO: 4140 - protein, 15 aa, synthetic construct
LFGGLRPHGLALSIL

SEQ ID NO: 4141 - protein, 15 aa, synthetic construct
PAGRCLRCLRGLTHP

SEQ ID NO: 4142 - protein, 15 aa, synthetic construct
PCWGRCPLGPGRGTA

SEQ ID NO: 4143 - protein, 15 aa, synthetic construct
QEAGGVPVLPERARG

SEQ ID NO: 4144 - protein, 15 aa, synthetic construct
RTPRVAHAVRSPAPR

SEQ ID NO: 4145 - protein, 15 aa, synthetic construct
SAAGGATRASLRAAG

SEQ ID NO: 4146 - protein, 15 aa, synthetic construct
SAAQRASPASGGAAP

SEQ ID NO: 4147 - protein, 15 aa, synthetic construct
SCASASASSTRSWAP

SEQ ID NO: 4148 - protein, 15 aa, synthetic construct
STGASGLRFHNKLLL

SEQ ID NO: 4149 - protein, 15 aa, synthetic construct
TPTRDSHADSSAACR

SEQ ID NO: 4150 - protein, 15 aa, synthetic construct
TRRGAHRALPGRLQP

SEQ ID NO: 4151 - protein, 15 aa, synthetic construct
TSFCTPAPASGTARG

SEQ ID NO: 4152 - protein, 15 aa, synthetic construct
VAYRGLRRLLPGLQP

SEQ ID NO: 4153 - protein, 15 aa, synthetic construct
WGDLNPAAGSCSCLS

SEQ ID NO: 4154 - protein, 15 aa, synthetic construct
WGEDGGCVSSSTSCG

SEQ ID NO: 4155 - protein, 15 aa, synthetic construct
WRTREQLARGRSLSP

SEQ ID NO: 4156 - protein, 15 aa, synthetic construct
AEPGRDPAPGAAPAA

SEQ ID NO: 4157 - protein, 15 aa, synthetic construct
AKVDTVGCSLPDPPL

SEQ ID NO: 4158 - protein, 15 aa, synthetic construct
CAGTSRRPAATATTT

SEQ ID NO: 4159 - protein, 15 aa, synthetic construct
CPRTRGRRRRQLPPA

SEQ ID NO: 4160 - protein, 15 aa, synthetic construct
CRPEGQPLSCCCCGC

SEQ ID NO: 4161 - protein, 15 aa, synthetic construct
CWRLRCCWGSGPRRR

SEQ ID NO: 4162 - protein, 15 aa, synthetic construct
EIPRRGATRGRVGEA

SEQ ID NO: 4163 - protein, 15 aa, synthetic construct
ELSVAGRRAVPEQQP

SEQ ID NO: 4164 - protein, 15 aa, synthetic construct
ENISKGIQVYFEKMH

SEQ ID NO: 4165 - protein, 15 aa, synthetic construct
ESPAGKATDSGADLG

SEQ ID NO: 4166 - protein, 15 aa, synthetic construct
EYQPGKGSARPTTAD

SEQ ID NO: 4167 - protein, 15 aa, synthetic construct
GASSATPRPAATAGD

SEQ ID NO: 4168 - protein, 15 aa, synthetic construct
GDSAAPCPPSALRAP

SEQ ID NO: 4169 - protein, 15 aa, synthetic construct
GGGGWQQRRRRGDQR

SEQ ID NO: 4170 - protein, 15 aa, synthetic construct
GHGPDPAPSGRRREP

SEQ ID NO: 4171 - protein, 15 aa, synthetic construct
GMHLPLQKAWTERGC

SEQ ID NO: 4172 - protein, 15 aa, synthetic construct
GRAAAERGRGEPQRE

SEQ ID NO: 4173 - protein, 15 aa, synthetic construct
GRAPRGRRRGRTGPA

SEQ ID NO: 4174 - protein, 15 aa, synthetic construct
GSARRAGASTSAGSG

SEQ ID NO: 4175 - protein, 15 aa, synthetic construct
GTRPGPCSLGAAKGA

SEQ ID NO: 4176 - protein, 15 aa, synthetic construct
IPHPRPAPASAPWPS

SEQ ID NO: 4177 - protein, 15 aa, synthetic construct
LLEGKDLRMSPQKQP

SEQ ID NO: 4178 - protein, 15 aa, synthetic construct
PLRPGASRLHPGSLR

SEQ ID NO: 4179 - protein, 15 aa, synthetic construct
PVLEAAEPAAQAERP

SEQ ID NO: 4180 - protein, 15 aa, synthetic construct
RGRPPLPAAGARRAP

SEQ ID NO: 4181 - protein, 15 aa, synthetic construct
RPLARVLRRRPEARE

SEQ ID NO: 4182 - protein, 15 aa, synthetic construct
RRARGPWPRRTWSST

SEQ ID NO: 4183 - protein, 15 aa, synthetic construct
RRCPAFPTSRSSWCP

SEQ ID NO: 4184 - protein, 15 aa, synthetic construct
RRPLAAAGRRAPPAV

SEQ ID NO: 4185 - protein, 15 aa, synthetic construct
RSHRTNLKRRCSPST

SEQ ID NO: 4186 - protein, 15 aa, synthetic construct
SATSPYTSGLCWPSL

SEQ ID NO: 4187 - protein, 15 aa, synthetic construct
SRRSPPPHLAPEVAA

SEQ ID NO: 4188 - protein, 15 aa, synthetic construct
STSDLAIWPGSRSSQ

SEQ ID NO: 4189 - protein, 15 aa, synthetic construct
STSGANWCRWRSTAD

SEQ ID NO: 4190 - protein, 15 aa, synthetic construct
SVVSALGGQNGRRCH

SEQ ID NO: 4191 - protein, 15 aa, synthetic construct
TVPAALLAECDRQTQ

SEQ ID NO: 4192 - protein, 15 aa, synthetic construct
WALELADRAGLCREG

SEQ ID NO: 4193 - protein, 15 aa, synthetic construct
WAVSRAPRPRADPTI

SEQ ID NO: 4194 - protein, 15 aa, synthetic construct
WPARVLRRRQAPVSP

SEQ ID NO: 4195 - protein, 15 aa, synthetic construct
AAQFLHLLLLFSAWR

SEQ ID NO: 4196 - protein, 15 aa, synthetic construct
AGAAPRGAGGLAPGG

SEQ ID NO: 4197 - protein, 15 aa, synthetic construct
AGEFRLRGGQPLPSA

SEQ ID NO: 4198 - protein, 15 aa, synthetic construct
AGGEPGALPHDLPAD

SEQ ID NO: 4199 - protein, 15 aa, synthetic construct
AGREGGAAGGGPAGG

SEQ ID NO: 4200 - protein, 15 aa, synthetic construct
ALLPPFSPACCPTAR

SEQ ID NO: 4201 - protein, 15 aa, synthetic construct
AQVRLPAQAEAWPQA

SEQ ID NO: 4202 - protein, 15 aa, synthetic construct
CCCCCCRCFCCCSGM

SEQ ID NO: 4203 - protein, 15 aa, synthetic construct
CCRAPREPGGVGPWW

SEQ ID NO: 4204 - protein, 15 aa, synthetic construct
CGRAWSAGSWRGPWC

SEQ ID NO: 4205 - protein, 15 aa, synthetic construct
CPGCGRCWASGCWLR

SEQ ID NO: 4206 - protein, 15 aa, synthetic construct
CPPFQCSWMCPSPTS

SEQ ID NO: 4207 - protein, 15 aa, synthetic construct
CRARSSSRCRISTTC

SEQ ID NO: 4208 - protein, 15 aa, synthetic construct
EGQVGPVHPAGGARL

SEQ ID NO: 4209 - protein, 15 aa, synthetic construct
ERGRSGRGAPAPALL

SEQ ID NO: 4210 - protein, 15 aa, synthetic construct
GADVCRVGGRRALLI

SEQ ID NO: 4211 - protein, 15 aa, synthetic construct
GEALPACPLHPASRP

SEQ ID NO: 4212 - protein, 15 aa, synthetic construct
GGRGVGAATAAARVL

SEQ ID NO: 4213 - protein, 15 aa, synthetic construct
GGYPESLAGRARLRR

SEQ ID NO: 4214 - protein, 15 aa, synthetic construct
GHRPAARGGGRRAWA

SEQ ID NO: 4215 - protein, 15 aa, synthetic construct
GLRAPAHGAALSGRH

SEQ ID NO: 4216 - protein, 15 aa, synthetic construct
GRGGGGGGRVPAAVV

SEQ ID NO: 4217 - protein, 15 aa, synthetic construct
GRPESGARADPGGPE

SEQ ID NO: 4218 - protein, 15 aa, synthetic construct
LGRQRLLQPPEPALQ

SEQ ID NO: 4219 - protein, 15 aa, synthetic construct
LHARQLPARLQLRRL

SEQ ID NO: 4220 - protein, 15 aa, synthetic construct
LLRAARTRRGRRRGD

SEQ ID NO: 4221 - protein, 15 aa, synthetic construct
LPLLPPGSPRRAATP

SEQ ID NO: 4222 - protein, 15 aa, synthetic construct
PAHVPLRLLLPGRAL

SEQ ID NO: 4223 - protein, 15 aa, synthetic construct
PGEGSERLRLPPARG

SEQ ID NO: 4224 - protein, 15 aa, synthetic construct
PHLAVRAPALAGRAV

SEQ ID NO: 4225 - protein, 15 aa, synthetic construct
PMRVPARPGAGVQRQ

SEQ ID NO: 4226 - protein, 15 aa, synthetic construct
PRSKEGPGKRQGRRP

SEQ ID NO: 4227 - protein, 15 aa, synthetic construct
PVGRPGRGPRGAQGT

SEQ ID NO: 4228 - protein, 15 aa, synthetic construct
RAGAGALQGLHSAPG

SEQ ID NO: 4229 - protein, 15 aa, synthetic construct
RCCGIRGRRNARCCW

SEQ ID NO: 4230 - protein, 15 aa, synthetic construct
REREKVAEQGRRAET

SEQ ID NO: 4231 - protein, 15 aa, synthetic construct
RGQCLGTRCCGAARA

SEQ ID NO: 4232 - protein, 15 aa, synthetic construct
RGRRRRGRPGKPHPR

SEQ ID NO: 4233 - protein, 15 aa, synthetic construct
RPPLPDVVRAAAALA

SEQ ID NO: 4234 - protein, 15 aa, synthetic construct
RPQPQQQQQQQQPQR

SEQ ID NO: 4235 - protein, 15 aa, synthetic construct
RRRGEGAGPGARSRR

SEQ ID NO: 4236 - protein, 15 aa, synthetic construct
RSPTSSSAPMCPRRP

SEQ ID NO: 4237 - protein, 15 aa, synthetic construct
RSTGKAGPVLIQVHI

SEQ ID NO: 4238 - protein, 15 aa, synthetic construct
SRTAAAATASRASPA

SEQ ID NO: 4239 - protein, 15 aa, synthetic construct
SSRSWSAARPPFGAW

SEQ ID NO: 4240 - protein, 15 aa, synthetic construct
TAAPSWPSAGATCAP

SEQ ID NO: 4241 - protein, 15 aa, synthetic construct
TGTAWSLRNWSLRSC

SEQ ID NO: 4242 - protein, 15 aa, synthetic construct
VPARPEARRLPAAPA

SEQ ID NO: 4243 - protein, 15 aa, synthetic construct
VPAVGDQCRDRVAPC

SEQ ID NO: 4244 - protein, 15 aa, synthetic construct
VPPPGGPAEPGQRGP

SEQ ID NO: 4245 - protein, 15 aa, synthetic construct
VPPSHAPGGHRGRLW

SEQ ID NO: 4246 - protein, 15 aa, synthetic construct
WGPHAARRPLSRGPC

SEQ ID NO: 4247 - protein, 15 aa, synthetic construct
WGWRRRASWSARRWA

SEQ ID NO: 4248 - protein, 15 aa, synthetic construct
WLMSPLGPARDPGPS

SEQ ID NO: 4249 - protein, 15 aa, synthetic construct
WLVTWSSVRDISAMG

SEQ ID NO: 4250 - protein, 15 aa, synthetic construct
WPLPPSRPGRCSFCR

SEQ ID NO: 4251 - protein, 15 aa, synthetic construct
WTHRTPRAPTGQRVP

SEQ ID NO: 4252 - protein, 15 aa, synthetic construct
AAPHRPLRRPAPGGS

SEQ ID NO: 4253 - protein, 15 aa, synthetic construct
AAPRGARRGHLLRRL

SEQ ID NO: 4254 - protein, 15 aa, synthetic construct
AARPSRAPAAPAARG

SEQ ID NO: 4255 - protein, 15 aa, synthetic construct
AKFCRSSTRGPRRNS

SEQ ID NO: 4256 - protein, 15 aa, synthetic construct
ARAARSRRPPAPAAF

SEQ ID NO: 4257 - protein, 15 aa, synthetic construct
ARALRAGHAPRLRRV

SEQ ID NO: 4258 - protein, 15 aa, synthetic construct
ARGRRRRPALLAGVC

SEQ ID NO: 4259 - protein, 15 aa, synthetic construct
ARKARCSGRRATVTR

SEQ ID NO: 4260 - protein, 15 aa, synthetic construct
ARLVRAGHAVLRLLL

SEQ ID NO: 4261 - protein, 15 aa, synthetic construct
ARRARGSRGGASGGG

SEQ ID NO: 4262 - protein, 15 aa, synthetic construct
ARRLGRPRCRRPAGR

SEQ ID NO: 4263 - protein, 15 aa, synthetic construct
ARRRRRRRRRPGDHL

SEQ ID NO: 4264 - protein, 15 aa, synthetic construct
ARVLGRCGAQARPGV

SEQ ID NO: 4265 - protein, 15 aa, synthetic construct
CAPEPQPAPPRRSGS

SEQ ID NO: 4266 - protein, 15 aa, synthetic construct
GGPDEPAARGRGGGG

SEQ ID NO: 4267 - protein, 15 aa, synthetic construct
GSCTFFRRDREAAGG

SEQ ID NO: 4268 - protein, 15 aa, synthetic construct
GTRPTPGATRRAASA

SEQ ID NO: 4269 - protein, 15 aa, synthetic construct
GVSLGPSPQMVHPLA

SEQ ID NO: 4270 - protein, 15 aa, synthetic construct
HGSSPMSLHPRLFTH

SEQ ID NO: 4271 - protein, 15 aa, synthetic construct
LSLARDLSHSRQHRN

SEQ ID NO: 4272 - protein, 15 aa, synthetic construct
QPSGPAAPRPLYQPH

SEQ ID NO: 4273 - protein, 15 aa, synthetic construct
RAGAQAPAPARARTG

SEQ ID NO: 4274 - protein, 15 aa, synthetic construct
RRPAAPAAATTPAAG

SEQ ID NO: 4275 - protein, 15 aa, synthetic construct
SANRATGHPGGAGLR

SEQ ID NO: 4276 - protein, 15 aa, synthetic construct
SAPRCWLPSSSRKVA

SEQ ID NO: 4277 - protein, 15 aa, synthetic construct
TAAPAAAAARGAPAR

SEQ ID NO: 4278 - protein, 15 aa, synthetic construct
TPPDPRAFAPRRKGA

SEQ ID NO: 4279 - protein, 15 aa, synthetic construct
TTPRGAWSPGPEPRS

SEQ ID NO: 4280 - protein, 15 aa, synthetic construct
VHRPRRRPRQHPRPA

SEQ ID NO: 4281 - protein, 15 aa, synthetic construct
WARFTRTPLSKRRPD

SEQ ID NO: 4282 - protein, 15 aa, synthetic construct
AAAPRGAVRARAGVA

SEQ ID NO: 4283 - protein, 15 aa, synthetic construct
AAGVRSAGSGATGAR

SEQ ID NO: 4284 - protein, 15 aa, synthetic construct
APDQPWAAGAGEGLP

SEQ ID NO: 4285 - protein, 15 aa, synthetic construct
APPRFPRLGATEPFW

SEQ ID NO: 4286 - protein, 15 aa, synthetic construct
ARAFARAAPGATRPL

SEQ ID NO: 4287 - protein, 15 aa, synthetic construct
GAVFSLSRGVRASHA

SEQ ID NO: 4288 - protein, 15 aa, synthetic construct
GGRGPGGGGRGVAPG

SEQ ID NO: 4289 - protein, 15 aa, synthetic construct
GLERSSSSAPSDAQH

SEQ ID NO: 4290 - protein, 15 aa, synthetic construct
GMRSAQSRQAEGEAA

SEQ ID NO: 4291 - protein, 15 aa, synthetic construct
GRGVAASRTVLLPLL

SEQ ID NO: 4292 - protein, 15 aa, synthetic construct
GRPSGVHHGRGQSRS

SEQ ID NO: 4293 - protein, 15 aa, synthetic construct
GVRASFDSYCCRSRL

SEQ ID NO: 4294 - protein, 15 aa, synthetic construct
GVWTVLLVLPAAGVP

SEQ ID NO: 4295 - protein, 15 aa, synthetic construct
IGSGVRASGLSAWNS

SEQ ID NO: 4296 - protein, 15 aa, synthetic construct
PGDPSADRDSRGARR

SEQ ID NO: 4297 - protein, 15 aa, synthetic construct
RAGPAPVRASLSAAR

SEQ ID NO: 4298 - protein, 15 aa, synthetic construct
RSAGAARSPRRAAAG

SEQ ID NO: 4299 - protein, 15 aa, synthetic construct
SFLGEAACAYGPGDH

SEQ ID NO: 4300 - protein, 15 aa, synthetic construct
SRWTQLWSCSSLGFS

SEQ ID NO: 4301 - protein, 15 aa, synthetic construct
TSPSPRKSWRMGKVW

SEQ ID NO: 4302 - protein, 15 aa, synthetic construct
WALCASSSLSTGCST

SEQ ID NO: 4303 - protein, 15 aa, synthetic construct
WIPVPARDAPTTQAM

SEQ ID NO: 4304 - protein, 15 aa, synthetic construct
WPSSKQVAGNGKRPR

SEQ ID NO: 4305 - protein, 15 aa, synthetic construct
WSPAPRAGVVSCSGS

SEQ ID NO: 4306 - protein, 15 aa, synthetic construct
WSPRPRIPARGPSKR

SEQ ID NO: 4307 - protein, 15 aa, synthetic construct
WSQKPLKFALMILTT

SEQ ID NO: 4308 - protein, 15 aa, synthetic construct
AASDIQAVRWELLQT

SEQ ID NO: 4309 - protein, 15 aa, synthetic construct
AATRLRRPQAPRAPA

SEQ ID NO: 4310 - protein, 15 aa, synthetic construct
AGRTASATTCHSTSA

SEQ ID NO: 4311 - protein, 15 aa, synthetic construct
AIAPVVGAGRPLCLD

SEQ ID NO: 4312 - protein, 15 aa, synthetic construct
ALAAWSEAPTLTAAG

SEQ ID NO: 4313 - protein, 15 aa, synthetic construct
APDGDPPGPCALGLQ

SEQ ID NO: 4314 - protein, 15 aa, synthetic construct
ARRRARRERGLPGGH

SEQ ID NO: 4315 - protein, 15 aa, synthetic construct
ASARAACARAPAAAP

SEQ ID NO: 4316 - protein, 15 aa, synthetic construct
ASCSGRPPAASCPGS

SEQ ID NO: 4317 - protein, 15 aa, synthetic construct
AVEEEGAAGARDRPR

SEQ ID NO: 4318 - protein, 15 aa, synthetic construct
AVPGDPEPEPLQGAL

SEQ ID NO: 4319 - protein, 15 aa, synthetic construct
AVQDRGAGAAERDEP

SEQ ID NO: 4320 - protein, 15 aa, synthetic construct
CKCWAARPRRTAWRR

SEQ ID NO: 4321 - protein, 15 aa, synthetic construct
CNSPRLQPRGAPRRR

SEQ ID NO: 4322 - protein, 15 aa, synthetic construct
DKAAKEKVYLVLQHP

SEQ ID NO: 4323 - protein, 15 aa, synthetic construct
DTLGNGCCQPYTSRD

SEQ ID NO: 4324 - protein, 15 aa, synthetic construct
EASPPALGPAAAGDS

SEQ ID NO: 4325 - protein, 15 aa, synthetic construct
EDPVPGCHARPGRCP

SEQ ID NO: 4326 - protein, 15 aa, synthetic construct
EEAPAPGRARPSGRS

SEQ ID NO: 4327 - protein, 15 aa, synthetic construct
EEICLLQGGSSHFAD

SEQ ID NO: 4328 - protein, 15 aa, synthetic construct
EGAEPGARLLRGGVL

SEQ ID NO: 4329 - protein, 15 aa, synthetic construct
EPDRARRAVQLRVRR

SEQ ID NO: 4330 - protein, 15 aa, synthetic construct
EPGAGIQERGAGSGE

SEQ ID NO: 4331 - protein, 15 aa, synthetic construct
EPPQPPPLWPLLGVI

SEQ ID NO: 4332 - protein, 15 aa, synthetic construct
EPSQPSKTDRQTDRQ

SEQ ID NO: 4333 - protein, 15 aa, synthetic construct
EVPEIPDGAADGHRR

SEQ ID NO: 4334 - protein, 15 aa, synthetic construct
EVPFDAAGERPHIFF

SEQ ID NO: 4335 - protein, 15 aa, synthetic construct
GAAAAAAGGRLLQSV

SEQ ID NO: 4336 - protein, 15 aa, synthetic construct
GARARARGRGGSRGA

SEQ ID NO: 4337 - protein, 15 aa, synthetic construct
GELPKGGKDRRGHVR

SEQ ID NO: 4338 - protein, 15 aa, synthetic construct
GNSAGEHAQHPPHQF

SEQ ID NO: 4339 - protein, 15 aa, synthetic construct
GNSLRGLGLVWLRSA

SEQ ID NO: 4340 - protein, 15 aa, synthetic construct
GRDEPTSVPRAGPTP

SEQ ID NO: 4341 - protein, 15 aa, synthetic construct
GREGAVTAAAAAAGR

SEQ ID NO: 4342 - protein, 15 aa, synthetic construct
GSASVAAGGARRGAG

SEQ ID NO: 4343 - protein, 15 aa, synthetic construct
KSAEWHFVCEFSDRP

SEQ ID NO: 4344 - protein, 15 aa, synthetic construct
LHPRGAPLASRAPGI

SEQ ID NO: 4345 - protein, 15 aa, synthetic construct
LLDPGGSQTRNLRWP

SEQ ID NO: 4346 - protein, 15 aa, synthetic construct
LYVRPRAQLPGGGQG

SEQ ID NO: 4347 - protein, 15 aa, synthetic construct
MPLHPRPFLHASSPT

SEQ ID NO: 4348 - protein, 15 aa, synthetic construct
MPLPPRRPRRASRES

SEQ ID NO: 4349 - protein, 15 aa, synthetic construct
PATAAAAAAGGARRG

SEQ ID NO: 4350 - protein, 15 aa, synthetic construct
PEPQRQPRRRPDERA

SEQ ID NO: 4351 - protein, 15 aa, synthetic construct
PLPARASQDHQRAGW

SEQ ID NO: 4352 - protein, 15 aa, synthetic construct
PLPEVCGGRPAFPAA

SEQ ID NO: 4353 - protein, 15 aa, synthetic construct
PLPGLGGLHGAGGHR

SEQ ID NO: 4354 - protein, 15 aa, synthetic construct
PLPGSSRDLGGTWAF

SEQ ID NO: 4355 - protein, 15 aa, synthetic construct
PLPHHGGLPLRGDIS

SEQ ID NO: 4356 - protein, 15 aa, synthetic construct
PLPPAESRSGGPRRP

SEQ ID NO: 4357 - protein, 15 aa, synthetic construct
PLPPGERVRDEGVLR

SEQ ID NO: 4358 - protein, 15 aa, synthetic construct
PLPRDLLGHHRGEPG

SEQ ID NO: 4359 - protein, 15 aa, synthetic construct
PLPRPAAEGRHHPQP

SEQ ID NO: 4360 - protein, 15 aa, synthetic construct
PLPSSQPACAADSGG

SEQ ID NO: 4361 - protein, 15 aa, synthetic construct
PLPVPRDAAGRPQAA

SEQ ID NO: 4362 - protein, 15 aa, synthetic construct
PSRRAVGPAEGAGCR

SEQ ID NO: 4363 - protein, 15 aa, synthetic construct
PSRRRPGATRHRLPP

SEQ ID NO: 4364 - protein, 15 aa, synthetic construct
QVPPEEREHEAVCTV

SEQ ID NO: 4365 - protein, 15 aa, synthetic construct
RAPRRRVPTRRAARM

SEQ ID NO: 4366 - protein, 15 aa, synthetic construct
RVPEPRARTWGMRTP

SEQ ID NO: 4367 - protein, 15 aa, synthetic construct
RVPGAGCCCWRCLPP

SEQ ID NO: 4368 - protein, 15 aa, synthetic construct
SCVQSQKQVDGRGGG

SEQ ID NO: 4369 - protein, 15 aa, synthetic construct
SGSDFGGIEAAAEPG

SEQ ID NO: 4370 - protein, 15 aa, synthetic construct
TVPDSNRQPPLRGRP

SEQ ID NO: 4371 - protein, 15 aa, synthetic construct
WAHRRAGACCSAWLY

SEQ ID NO: 4372 - protein, 15 aa, synthetic construct
WGRLNFRALLPKPGC

SEQ ID NO: 4373 - protein, 15 aa, synthetic construct
ADAAAAYRFYYLFHQ

SEQ ID NO: 4374 - protein, 15 aa, synthetic construct
CPCTAASCGSPRGCA

SEQ ID NO: 4375 - protein, 15 aa, synthetic construct
CRTRGALSRPTRSSW

SEQ ID NO: 4376 - protein, 15 aa, synthetic construct
DNPTPRPAVQAEDGI

SEQ ID NO: 4377 - protein, 15 aa, synthetic construct
GADYGFVQPHSRPAE

SEQ ID NO: 4378 - protein, 15 aa, synthetic construct
GGAVLAGSERLLRPG

SEQ ID NO: 4379 - protein, 15 aa, synthetic construct
GRGAPGPVEGERGGV

SEQ ID NO: 4380 - protein, 15 aa, synthetic construct
GRPPRPRPAEPVDPV

SEQ ID NO: 4381 - protein, 15 aa, synthetic construct
LGDPEEQLLLHPAAA

SEQ ID NO: 4382 - protein, 15 aa, synthetic construct
PMRRPRRGRGPPPRA

SEQ ID NO: 4383 - protein, 15 aa, synthetic construct
PRPGRQAPATAQRGP

SEQ ID NO: 4384 - protein, 15 aa, synthetic construct
QEPPAAAAARLPRAA

SEQ ID NO: 4385 - protein, 15 aa, synthetic construct
QPPRGGRPRLLQAGN

SEQ ID NO: 4386 - protein, 15 aa, synthetic construct
QPREPPRGARSGSPG

SEQ ID NO: 4387 - protein, 15 aa, synthetic construct
SAAQGGGRPERRRRL

SEQ ID NO: 4388 - protein, 15 aa, synthetic construct
SGARRGAHAGGLRGR

SEQ ID NO: 4389 - protein, 15 aa, synthetic construct
SPTRYTSGAPFPPPT

SEQ ID NO: 4390 - protein, 15 aa, synthetic construct
TSTRTPAASCCWRRS

SEQ ID NO: 4391 - protein, 15 aa, synthetic construct
VGLRDLRRYLLAGVG

SEQ ID NO: 4392 - protein, 15 aa, synthetic construct
WLARSSSPLTCTWPS

SEQ ID NO: 4393 - protein, 15 aa, synthetic construct
WLRAPPRPPHLQQPQ

SEQ ID NO: 4394 - protein, 15 aa, synthetic construct
AEGGRVRAGAEVGAG

SEQ ID NO: 4395 - protein, 15 aa, synthetic construct
AGALGAAPAGPEATA

SEQ ID NO: 4396 - protein, 15 aa, synthetic construct
AGDPSRAAAERAAGF

SEQ ID NO: 4397 - protein, 15 aa, synthetic construct
AGHAGLAGRARGLRV

SEQ ID NO: 4398 - protein, 15 aa, synthetic construct
AGHRLLHVLGGRLCA

SEQ ID NO: 4399 - protein, 15 aa, synthetic construct
AGLHCCPCRPPLHHG

SEQ ID NO: 4400 - protein, 15 aa, synthetic construct
AGPGFHVCPGAGVSA

SEQ ID NO: 4401 - protein, 15 aa, synthetic construct
AGSALASVAGAGRGL

SEQ ID NO: 4402 - protein, 15 aa, synthetic construct
AGSARPARGPGGGRA

SEQ ID NO: 4403 - protein, 15 aa, synthetic construct
AGSASGTCGSSKLRP

SEQ ID NO: 4404 - protein, 15 aa, synthetic construct
AGSAWKSSWSPSPSR

SEQ ID NO: 4405 - protein, 15 aa, synthetic construct
AGSERAAGQPGAAAG

SEQ ID NO: 4406 - protein, 15 aa, synthetic construct
AGSGCGRGLGGLAGA

SEQ ID NO: 4407 - protein, 15 aa, synthetic construct
AGSGLRPLAATLAPT

SEQ ID NO: 4408 - protein, 15 aa, synthetic construct
AGSGRATRSSLAQSW

SEQ ID NO: 4409 - protein, 15 aa, synthetic construct
AGSGRFPGRCQGGRR

SEQ ID NO: 4410 - protein, 15 aa, synthetic construct
AGSGRFPGRSQGGRR

SEQ ID NO: 4411 - protein, 15 aa, synthetic construct
AGSKGRPGLRGHPCV

SEQ ID NO: 4412 - protein, 15 aa, synthetic construct
AGSLAFGGFGGPPAL

SEQ ID NO: 4413 - protein, 15 aa, synthetic construct
AGSPDRGSGESDLRG

SEQ ID NO: 4414 - protein, 15 aa, synthetic construct
AGSPGLQRGWGRFLH

SEQ ID NO: 4415 - protein, 15 aa, synthetic construct
AGSPRSPSLRPGDRA

SEQ ID NO: 4416 - protein, 15 aa, synthetic construct
AGSPSLVFCEAGAKQ

SEQ ID NO: 4417 - protein, 15 aa, synthetic construct
AGSPSPHPRRVQLLA

SEQ ID NO: 4418 - protein, 15 aa, synthetic construct
AGSQWHPLPASNTPA

SEQ ID NO: 4419 - protein, 15 aa, synthetic construct
AGSRAARPQGRQLRR

SEQ ID NO: 4420 - protein, 15 aa, synthetic construct
AGSRCVPFGWSAEEG

SEQ ID NO: 4421 - protein, 15 aa, synthetic construct
AGSRGWGCASGRQGP

SEQ ID NO: 4422 - protein, 15 aa, synthetic construct
AGSRPPGPAAAAAAA

SEQ ID NO: 4423 - protein, 15 aa, synthetic construct
AGSRRGPPPSAALRR

SEQ ID NO: 4424 - protein, 15 aa, synthetic construct
AGSRRTWGWSWRSWC

SEQ ID NO: 4425 - protein, 15 aa, synthetic construct
AGSSASSPGCSSCWC

SEQ ID NO: 4426 - protein, 15 aa, synthetic construct
AGSSEIRSCSQEGLQ

SEQ ID NO: 4427 - protein, 15 aa, synthetic construct
AGSSGTRRRQPRRGW

SEQ ID NO: 4428 - protein, 15 aa, synthetic construct
AGSSLQPHNGNPCLL

SEQ ID NO: 4429 - protein, 15 aa, synthetic construct
AGSVAGCVAPSSWRA

SEQ ID NO: 4430 - protein, 15 aa, synthetic construct
AGSVPAEPSAGRQRH

SEQ ID NO: 4431 - protein, 15 aa, synthetic construct
AGSVQRPVRRQRRGR

SEQ ID NO: 4432 - protein, 15 aa, synthetic construct
AGTAAPAHGSRSRRR

SEQ ID NO: 4433 - protein, 15 aa, synthetic construct
AGTAAPRSPRPQRRQ

SEQ ID NO: 4434 - protein, 15 aa, synthetic construct
AGTARAPRTLCVPTP

SEQ ID NO: 4435 - protein, 15 aa, synthetic construct
AGTAVAAGARDTQVR

SEQ ID NO: 4436 - protein, 15 aa, synthetic construct
AGTAVRTGVGGSFGG

SEQ ID NO: 4437 - protein, 15 aa, synthetic construct
AGTCPGEESAGPEER

SEQ ID NO: 4438 - protein, 15 aa, synthetic construct
AGTCRSLSTSGTSAC

SEQ ID NO: 4439 - protein, 15 aa, synthetic construct
AGTKGVAMATGGRAW

SEQ ID NO: 4440 - protein, 15 aa, synthetic construct
AGTKRAWDCSPPSSC

SEQ ID NO: 4441 - protein, 15 aa, synthetic construct
AGTRAAWGQWWLSVH

SEQ ID NO: 4442 - protein, 15 aa, synthetic construct
AGTRAGRCRHRQRTA

SEQ ID NO: 4443 - protein, 15 aa, synthetic construct
AGTRCPTTSWSASSC

SEQ ID NO: 4444 - protein, 15 aa, synthetic construct
AGTSEVRSRAQEGLE

SEQ ID NO: 4445 - protein, 15 aa, synthetic construct
AGWGRLAPRESEERL

SEQ ID NO: 4446 - protein, 15 aa, synthetic construct
AGWPGPAAARRPSGS

SEQ ID NO: 4447 - protein, 15 aa, synthetic construct
AGWPTCTWAATARSR

SEQ ID NO: 4448 - protein, 15 aa, synthetic construct
AGWQRARQAARPASS

SEQ ID NO: 4449 - protein, 15 aa, synthetic construct
ALIRKTFVQPVRGGA

SEQ ID NO: 4450 - protein, 15 aa, synthetic construct
ARGARGRVAPRRGAG

SEQ ID NO: 4451 - protein, 15 aa, synthetic construct
AVVRTAGAGQHHRTA

SEQ ID NO: 4452 - protein, 15 aa, synthetic construct
FCWGLGRGHSKSGRV

SEQ ID NO: 4453 - protein, 15 aa, synthetic construct
GAKSSLFGAALCSFC

SEQ ID NO: 4454 - protein, 15 aa, synthetic construct
GGPGPPAQRGALGAV

SEQ ID NO: 4455 - protein, 15 aa, synthetic construct
GGRGASRLLRFFSAG

SEQ ID NO: 4456 - protein, 15 aa, synthetic construct
GHLAPQQAVQRGHVR

SEQ ID NO: 4457 - protein, 15 aa, synthetic construct
GQPLAVRLPRAQEQP

SEQ ID NO: 4458 - protein, 15 aa, synthetic construct
GRAFGPRRSHRDPVR

SEQ ID NO: 4459 - protein, 15 aa, synthetic construct
GSARLAAGTPPPWRR

SEQ ID NO: 4460 - protein, 15 aa, synthetic construct
GWNKRTFDAGKLHRW

SEQ ID NO: 4461 - protein, 15 aa, synthetic construct
LREREEVAAQVERPQ

SEQ ID NO: 4462 - protein, 15 aa, synthetic construct
MTAREPPQTPLPQRQ

SEQ ID NO: 4463 - protein, 15 aa, synthetic construct
PAALGARPPGAQALP

SEQ ID NO: 4464 - protein, 15 aa, synthetic construct
PAGYFALGAKEAPEL

SEQ ID NO: 4465 - protein, 15 aa, synthetic construct
PALTTTSTSASWARR

SEQ ID NO: 4466 - protein, 15 aa, synthetic construct
PEGSRPQWRGRDALH

SEQ ID NO: 4467 - protein, 15 aa, synthetic construct
RALPGTTRCSTTRWR

SEQ ID NO: 4468 - protein, 15 aa, synthetic construct
RLQPGVPGAAQALAD

SEQ ID NO: 4469 - protein, 15 aa, synthetic construct
RPAGRHPRRGGAGVE

SEQ ID NO: 4470 - protein, 15 aa, synthetic construct
RPSGLRVYRSSAAPP

SEQ ID NO: 4471 - protein, 15 aa, synthetic construct
RRAGLHQRRRYQRPA

SEQ ID NO: 4472 - protein, 15 aa, synthetic construct
RRAGLRLPPARREGP

SEQ ID NO: 4473 - protein, 15 aa, synthetic construct
RRPGAAERAAGSFGA

SEQ ID NO: 4474 - protein, 15 aa, synthetic construct
RRRGLRPGCGSRPAA

SEQ ID NO: 4475 - protein, 15 aa, synthetic construct
SASSAPRAGLAQIAC

SEQ ID NO: 4476 - protein, 15 aa, synthetic construct
SAVRRTAAPRRRRTK

SEQ ID NO: 4477 - protein, 15 aa, synthetic construct
SPRRSGPPRAERVPG

SEQ ID NO: 4478 - protein, 15 aa, synthetic construct
SSLPPSSMSSLGWGP

SEQ ID NO: 4479 - protein, 15 aa, synthetic construct
SSRLPKKPRPTASPP

SEQ ID NO: 4480 - protein, 15 aa, synthetic construct
SSRMRSLAAASGCRS

SEQ ID NO: 4481 - protein, 15 aa, synthetic construct
SSRSWGRCGGPRQRR

SEQ ID NO: 4482 - protein, 15 aa, synthetic construct
SSRTKEAPQPPVASL

SEQ ID NO: 4483 - protein, 15 aa, synthetic construct
SSRWPRAPASTQRTS

SEQ ID NO: 4484 - protein, 15 aa, synthetic construct
SSVCRRSPTTSSLHW

SEQ ID NO: 4485 - protein, 15 aa, synthetic construct
SSVRAAPTPRCSPSQ

SEQ ID NO: 4486 - protein, 15 aa, synthetic construct
SSVWPAPWHSPRIWG

SEQ ID NO: 4487 - protein, 15 aa, synthetic construct
TSVRTGRSTSSCARA

SEQ ID NO: 4488 - protein, 15 aa, synthetic construct
TTIRTITLSSSSSSR

SEQ ID NO: 4489 - protein, 15 aa, synthetic construct
TTSTTSTASTAPCPS

SEQ ID NO: 4490 - protein, 15 aa, synthetic construct
VGSGPGRGGPGPDPN

SEQ ID NO: 4491 - protein, 15 aa, synthetic construct
WASSALGRGGWAGSC

SEQ ID NO: 4492 - protein, 15 aa, synthetic construct
WHCSRPSGARPGVAS

SEQ ID NO: 4493 - protein, 15 aa, synthetic construct
WPGRCGHCCRRCCWP

SEQ ID NO: 4494 - protein, 15 aa, synthetic construct
AAAARAVRPERGLPA

SEQ ID NO: 4495 - protein, 15 aa, synthetic construct
AACASASSVRPSRRR

SEQ ID NO: 4496 - protein, 15 aa, synthetic construct
AAPLPPGDRARALAP

SEQ ID NO: 4497 - protein, 15 aa, synthetic construct
ACAPRPSRAPPLRAA

SEQ ID NO: 4498 - protein, 15 aa, synthetic construct
ADGQAARPLCLGTEV

SEQ ID NO: 4499 - protein, 15 aa, synthetic construct
AERALRAGARRARRA

SEQ ID NO: 4500 - protein, 15 aa, synthetic construct
ALWASRHGLRDEDRG

SEQ ID NO: 4501 - protein, 15 aa, synthetic construct
APAAGLPRHGGRQAA

SEQ ID NO: 4502 - protein, 15 aa, synthetic construct
APAAQRGGRALRVPG

SEQ ID NO: 4503 - protein, 15 aa, synthetic construct
APARRRGRRRRRRQR

SEQ ID NO: 4504 - protein, 15 aa, synthetic construct
APAVAKGAVALLGAP

SEQ ID NO: 4505 - protein, 15 aa, synthetic construct
APGFQHRGQRRRHER

SEQ ID NO: 4506 - protein, 15 aa, synthetic construct
APGLPRRLRGAAAGR

SEQ ID NO: 4507 - protein, 15 aa, synthetic construct
APGPQDPCARCRRGP

SEQ ID NO: 4508 - protein, 15 aa, synthetic construct
APLPGCCAACRPLGR

SEQ ID NO: 4509 - protein, 15 aa, synthetic construct
APLTALACCLPGTGR

SEQ ID NO: 4510 - protein, 15 aa, synthetic construct
APRRLEAAEARHAGR

SEQ ID NO: 4511 - protein, 15 aa, synthetic construct
APVCRPGGPPVSGGR

SEQ ID NO: 4512 - protein, 15 aa, synthetic construct
APVPWQRGRARHQAG

SEQ ID NO: 4513 - protein, 15 aa, synthetic construct
AWRTAAAPAAARPPA

SEQ ID NO: 4514 - protein, 15 aa, synthetic construct
CGDHPGPSWPALLLP

SEQ ID NO: 4515 - protein, 15 aa, synthetic construct
CGQGDRILRGGGRRG

SEQ ID NO: 4516 - protein, 15 aa, synthetic construct
CLGSAGMAAGARPGR

SEQ ID NO: 4517 - protein, 15 aa, synthetic construct
CSPAPASSPSATRTA

SEQ ID NO: 4518 - protein, 15 aa, synthetic construct
CSVRCPGPQPQAATT

SEQ ID NO: 4519 - protein, 15 aa, synthetic construct
CTARGSTGRSSTGAT

SEQ ID NO: 4520 - protein, 15 aa, synthetic construct
CTSRLSPPPRPPPLQ

SEQ ID NO: 4521 - protein, 15 aa, synthetic construct
DPAARGAAGAAPRGA

SEQ ID NO: 4522 - protein, 15 aa, synthetic construct
ETAQGDQELCVLCTA

SEQ ID NO: 4523 - protein, 15 aa, synthetic construct
FPGQTLRLQEEAQKK

SEQ ID NO: 4524 - protein, 15 aa, synthetic construct
GADGQLQDDPPGPAH

SEQ ID NO: 4525 - protein, 15 aa, synthetic construct
GAHARPPRSQQLAVL

SEQ ID NO: 4526 - protein, 15 aa, synthetic construct
GALGADRVRPKPEAE

SEQ ID NO: 4527 - protein, 15 aa, synthetic construct
GALLASGTHGSPLLA

SEQ ID NO: 4528 - protein, 15 aa, synthetic construct
GALRAAAGSRPGSGP

SEQ ID NO: 4529 - protein, 15 aa, synthetic construct
GALSSRWGLGDHSPG

SEQ ID NO: 4530 - protein, 15 aa, synthetic construct
GCAAKALVAATPGVS

SEQ ID NO: 4531 - protein, 15 aa, synthetic construct
GCVHYVCLLQRPELR

SEQ ID NO: 4532 - protein, 15 aa, synthetic construct
GDGAPSSGPGAGCFC

SEQ ID NO: 4533 - protein, 15 aa, synthetic construct
GDGDVGQWGEPPASA

SEQ ID NO: 4534 - protein, 15 aa, synthetic construct
GDPGGPREVQYVGGG

SEQ ID NO: 4535 - protein, 15 aa, synthetic construct
GDPGKADEGLRVPQV

SEQ ID NO: 4536 - protein, 15 aa, synthetic construct
GDPGRAEGALRPPAR

SEQ ID NO: 4537 - protein, 15 aa, synthetic construct
GDPGSREHGNRRPSL

SEQ ID NO: 4538 - protein, 15 aa, synthetic construct
GERRRSGHREAPRPL

SEQ ID NO: 4539 - protein, 15 aa, synthetic construct
GGGAGGGRGPQRRGG

SEQ ID NO: 4540 - protein, 15 aa, synthetic construct
GGGGRGASAARGDAA

SEQ ID NO: 4541 - protein, 15 aa, synthetic construct
GGLPEEGAAAPPAPR

SEQ ID NO: 4542 - protein, 15 aa, synthetic construct
GGLPLPCCLPVRGGA

SEQ ID NO: 4543 - protein, 15 aa, synthetic construct
GGPERPELPPAARVG

SEQ ID NO: 4544 - protein, 15 aa, synthetic construct
GHRIGQNLSDSGNSR

SEQ ID NO: 4545 - protein, 15 aa, synthetic construct
GHRQQNSAPGLSLTG

SEQ ID NO: 4546 - protein, 15 aa, synthetic construct
GKAADGCVARGEEER

SEQ ID NO: 4547 - protein, 15 aa, synthetic construct
GLPAASHEPGGPRAI

SEQ ID NO: 4548 - protein, 15 aa, synthetic construct
GPGGGRGNLAARGAG

SEQ ID NO: 4549 - protein, 15 aa, synthetic construct
GPLADLALLPLVPDG

SEQ ID NO: 4550 - protein, 15 aa, synthetic construct
GPLCRPGPAAALRGS

SEQ ID NO: 4551 - protein, 15 aa, synthetic construct
GPPGLPEAGDPRSRG

SEQ ID NO: 4552 - protein, 15 aa, synthetic construct
GPPKPSSGIPALCPL

SEQ ID NO: 4553 - protein, 15 aa, synthetic construct
GQLRPPAPGLLLGPG

SEQ ID NO: 4554 - protein, 15 aa, synthetic construct
GRAGAAAAAPVPLGA

SEQ ID NO: 4555 - protein, 15 aa, synthetic construct
GRCRPSPGRVLAEAT

SEQ ID NO: 4556 - protein, 15 aa, synthetic construct
GRLHHVHLLQRLHQL

SEQ ID NO: 4557 - protein, 15 aa, synthetic construct
GRLQPLLPAALPGSL

SEQ ID NO: 4558 - protein, 15 aa, synthetic construct
GRPGPPAARAPPVQA

SEQ ID NO: 4559 - protein, 15 aa, synthetic construct
GRPPDARRGLPPGAE

SEQ ID NO: 4560 - protein, 15 aa, synthetic construct
GRPPIPSFSARGSPG

SEQ ID NO: 4561 - protein, 15 aa, synthetic construct
GRPPVGNRPGLGCPP

SEQ ID NO: 4562 - protein, 15 aa, synthetic construct
GRPPVPLGARGGRAA

SEQ ID NO: 4563 - protein, 15 aa, synthetic construct
GRPRAWAPSCTASPA

SEQ ID NO: 4564 - protein, 15 aa, synthetic construct
GRRSRAARGPALPCR

SEQ ID NO: 4565 - protein, 15 aa, synthetic construct
GRVHHVHPLQRLLRL

SEQ ID NO: 4566 - protein, 15 aa, synthetic construct
GRVHHVRLLQRLLRL

SEQ ID NO: 4567 - protein, 15 aa, synthetic construct
GRVHHVRLLQRPELR

SEQ ID NO: 4568 - protein, 15 aa, synthetic construct
GSGGGGGGAGRGRRG

SEQ ID NO: 4569 - protein, 15 aa, synthetic construct
GSLPDPELLPQLRDP

SEQ ID NO: 4570 - protein, 15 aa, synthetic construct
GSPFDTNITRPGGYL

SEQ ID NO: 4571 - protein, 15 aa, synthetic construct
GVNIPGQKGNSRHHY

SEQ ID NO: 4572 - protein, 15 aa, synthetic construct
GVRDLPAAAAGGPAC

SEQ ID NO: 4573 - protein, 15 aa, synthetic construct
GVRSGPGLEHLGSHP

SEQ ID NO: 4574 - protein, 15 aa, synthetic construct
GVRSGSLASIGTRQV

SEQ ID NO: 4575 - protein, 15 aa, synthetic construct
GWPAAAAPLPAPGRA

SEQ ID NO: 4576 - protein, 15 aa, synthetic construct
GWPRGSEGPSERSGR

SEQ ID NO: 4577 - protein, 15 aa, synthetic construct
IHHQHAGECVHWTGK

SEQ ID NO: 4578 - protein, 15 aa, synthetic construct
IPLLPRGPAVPGGPS

SEQ ID NO: 4579 - protein, 15 aa, synthetic construct
LDLRVPRPGPEERAQ

SEQ ID NO: 4580 - protein, 15 aa, synthetic construct
LHSALTSPSLGRGGG

SEQ ID NO: 4581 - protein, 15 aa, synthetic construct
LLPPRSRRRRRRHRP

SEQ ID NO: 4582 - protein, 15 aa, synthetic construct
LLRGTAGVKAKSTRR

SEQ ID NO: 4583 - protein, 15 aa, synthetic construct
LPREPEQAEEPPDPA

SEQ ID NO: 4584 - protein, 15 aa, synthetic construct
LPSARLRRGPWPHWG

SEQ ID NO: 4585 - protein, 15 aa, synthetic construct
LPSPRAHPLPARAPP

SEQ ID NO: 4586 - protein, 15 aa, synthetic construct
LRPRRSYTSWRGSAW

SEQ ID NO: 4587 - protein, 15 aa, synthetic construct
LRRAVRRRGARGRGR

SEQ ID NO: 4588 - protein, 15 aa, synthetic construct
LRSPRGSKRRSSGRG

SEQ ID NO: 4589 - protein, 15 aa, synthetic construct
LSLTAGRGARGRRGG

SEQ ID NO: 4590 - protein, 15 aa, synthetic construct
MLAPGDAMGGQGQSD

SEQ ID NO: 4591 - protein, 15 aa, synthetic construct
PGRPPRPPRPHLPRW

SEQ ID NO: 4592 - protein, 15 aa, synthetic construct
PGRWMPAQRAAVSPT

SEQ ID NO: 4593 - protein, 15 aa, synthetic construct
PGRWTTAQRAAVSPP

SEQ ID NO: 4594 - protein, 15 aa, synthetic construct
PLPLPLPGRGSGKCA

SEQ ID NO: 4595 - protein, 15 aa, synthetic construct
PPRLRPPAVAAFRVS

SEQ ID NO: 4596 - protein, 15 aa, synthetic construct
PRAPRAPGTALPTCA

SEQ ID NO: 4597 - protein, 15 aa, synthetic construct
PSATARCCVTTSRAS

SEQ ID NO: 4598 - protein, 15 aa, synthetic construct
PSRPARPAAPGTLGA

SEQ ID NO: 4599 - protein, 15 aa, synthetic construct
QLHPRPSRLPGGAQA

SEQ ID NO: 4600 - protein, 15 aa, synthetic construct
QRLGAAGLPGRARHR

SEQ ID NO: 4601 - protein, 15 aa, synthetic construct
RAASSTTASWSASLT

SEQ ID NO: 4602 - protein, 15 aa, synthetic construct
RAGLRAWLRRRLRQP

SEQ ID NO: 4603 - protein, 15 aa, synthetic construct
RAPWLVPGELRAVAG

SEQ ID NO: 4604 - protein, 15 aa, synthetic construct
RGRVLESGPLRPGAS

SEQ ID NO: 4605 - protein, 15 aa, synthetic construct
RKPSPKPRRKTARSA

SEQ ID NO: 4606 - protein, 15 aa, synthetic construct
RPPTAPASRPPAWPS

SEQ ID NO: 4607 - protein, 15 aa, synthetic construct
RPSAACGSTRARSCS

SEQ ID NO: 4608 - protein, 15 aa, synthetic construct
RQVQRRRLRTAEPQL

SEQ ID NO: 4609 - protein, 15 aa, synthetic construct
RRAAAAAPAPTAVAT

SEQ ID NO: 4610 - protein, 15 aa, synthetic construct
RSISRPTRMSWRGTK

SEQ ID NO: 4611 - protein, 15 aa, synthetic construct
RSRLGAPSSARAASR

SEQ ID NO: 4612 - protein, 15 aa, synthetic construct
RSRLSAFSFCCWRLP

SEQ ID NO: 4613 - protein, 15 aa, synthetic construct
RSRLTPPAPLGQRGW

SEQ ID NO: 4614 - protein, 15 aa, synthetic construct
RSSGTRSSRRCASRC

SEQ ID NO: 4615 - protein, 15 aa, synthetic construct
SIRPVTYWLQGTWTG

SEQ ID NO: 4616 - protein, 15 aa, synthetic construct
STLRSPAPPWAVGAA

SEQ ID NO: 4617 - protein, 15 aa, synthetic construct
SVAPLQRRPRLQWHP

SEQ ID NO: 4618 - protein, 15 aa, synthetic construct
TPKSPGLFSFTIPSL

SEQ ID NO: 4619 - protein, 15 aa, synthetic construct
TYLAYWTTTRSWPYA

SEQ ID NO: 4620 - protein, 15 aa, synthetic construct
VPRRPPPHHRRRERR

SEQ ID NO: 4621 - protein, 15 aa, synthetic construct
VRAGPGPQTWKGSST

SEQ ID NO: 4622 - protein, 15 aa, synthetic construct
VRLLQRPELQQPRLP

SEQ ID NO: 4623 - protein, 15 aa, synthetic construct
VRLPGPPVPQQPLLH

SEQ ID NO: 4624 - protein, 15 aa, synthetic construct
WLRCEGSCGRHPGCL

SEQ ID NO: 4625 - protein, 15 aa, synthetic construct
WPRAPCPSAPALALT

SEQ ID NO: 4626 - protein, 15 aa, synthetic construct
WPRPPCLSAPALTPT

SEQ ID NO: 4627 - protein, 15 aa, synthetic construct
WPRPPCPSAPALAPT

SEQ ID NO: 4628 - protein, 15 aa, synthetic construct
WPRPPCPSAPALTPT

SEQ ID NO: 4629 - protein, 15 aa, synthetic construct
WQRRRRRWGRARAAR

SEQ ID NO: 4630 - protein, 15 aa, synthetic construct
WRCRDSAFQRWRAAV

SEQ ID NO: 4631 - protein, 15 aa, synthetic construct
WRPGAPRAATCGSSG

SEQ ID NO: 4632 - protein, 15 aa, synthetic construct
WRWRCRTVGRAACVG

SEQ ID NO: 4633 - protein, 15 aa, synthetic construct
YWPPEQGSRGGEQPK

SEQ ID NO: 4634 - protein, 15 aa, synthetic construct
AAPGPRAPPPGTPPA

SEQ ID NO: 4635 - protein, 15 aa, synthetic construct
ADRALPGHADHHQLV

SEQ ID NO: 4636 - protein, 15 aa, synthetic construct
ADRLGPPAERRPRQR

SEQ ID NO: 4637 - protein, 15 aa, synthetic construct
ADRNPESGSDPALHI

SEQ ID NO: 4638 - protein, 15 aa, synthetic construct
ADRQGGAVSRCPAPG

SEQ ID NO: 4639 - protein, 15 aa, synthetic construct
AGAGPGAPSPAAAAA

SEQ ID NO: 4640 - protein, 15 aa, synthetic construct
AGLGAWSCSFLRLAR

SEQ ID NO: 4641 - protein, 15 aa, synthetic construct
AGLGPRPLAAADPVG

SEQ ID NO: 4642 - protein, 15 aa, synthetic construct
AGLGRGRGGGARAAH

SEQ ID NO: 4643 - protein, 15 aa, synthetic construct
AGLGSRGAGGVRGVP

SEQ ID NO: 4644 - protein, 15 aa, synthetic construct
APAAGGPRVPRPLRG

SEQ ID NO: 4645 - protein, 15 aa, synthetic construct
APRAPRARANRGGRG

SEQ ID NO: 4646 - protein, 15 aa, synthetic construct
ATAAPCSPTTGSTSA

SEQ ID NO: 4647 - protein, 15 aa, synthetic construct
CAARWRSRRCCYCCQ

SEQ ID NO: 4648 - protein, 15 aa, synthetic construct
CCRPRAPRTLRLARP

SEQ ID NO: 4649 - protein, 15 aa, synthetic construct
CLGKGPQMQLSSLVP

SEQ ID NO: 4650 - protein, 15 aa, synthetic construct
CLTTMMELQWDLESR

SEQ ID NO: 4651 - protein, 15 aa, synthetic construct
CRGPEPPTTGPPAQA

SEQ ID NO: 4652 - protein, 15 aa, synthetic construct
CRSAPARWSQKAPGF

SEQ ID NO: 4653 - protein, 15 aa, synthetic construct
CSIARAAPRSFSAEP

SEQ ID NO: 4654 - protein, 15 aa, synthetic construct
DGLIIQPRSSAHHFR

SEQ ID NO: 4655 - protein, 15 aa, synthetic construct
DPAAALAARPPGRGP

SEQ ID NO: 4656 - protein, 15 aa, synthetic construct
DPGALLSAPPGSPAA

SEQ ID NO: 4657 - protein, 15 aa, synthetic construct
ENFLPSAVYSLLTFV

SEQ ID NO: 4658 - protein, 15 aa, synthetic construct
ERRRRRGVHRLAEEI

SEQ ID NO: 4659 - protein, 15 aa, synthetic construct
EVPAPGLGSPRIPDP

SEQ ID NO: 4660 - protein, 15 aa, synthetic construct
EVVPALDAGSSDSSS

SEQ ID NO: 4661 - protein, 15 aa, synthetic construct
GAAGALQPQPGRLRG

SEQ ID NO: 4662 - protein, 15 aa, synthetic construct
GAARGGPHGTGGAAR

SEQ ID NO: 4663 - protein, 15 aa, synthetic construct
GCWALLAARRPPAAS

SEQ ID NO: 4664 - protein, 15 aa, synthetic construct
GGAHRGAGTRGRGAA

SEQ ID NO: 4665 - protein, 15 aa, synthetic construct
GGGGGRWRLHREHGL

SEQ ID NO: 4666 - protein, 15 aa, synthetic construct
GGGGRGAPGLPERED

SEQ ID NO: 4667 - protein, 15 aa, synthetic construct
GGHGGPGQPDRQHRL

SEQ ID NO: 4668 - protein, 15 aa, synthetic construct
GGSGGVSRRPGDSIA

SEQ ID NO: 4669 - protein, 15 aa, synthetic construct
GHLRPPGPARAAPGS

SEQ ID NO: 4670 - protein, 15 aa, synthetic construct
GLAAPRPRAPRRLRR

SEQ ID NO: 4671 - protein, 15 aa, synthetic construct
GLGENLLVQPEGWMD

SEQ ID NO: 4672 - protein, 15 aa, synthetic construct
GLPDASLRGNDAKFL

SEQ ID NO: 4673 - protein, 15 aa, synthetic construct
GPAQPAPHALQGRYP

SEQ ID NO: 4674 - protein, 15 aa, synthetic construct
GPASRRHRFHLNKGR

SEQ ID NO: 4675 - protein, 15 aa, synthetic construct
GPPAAALAAVYPAAA

SEQ ID NO: 4676 - protein, 15 aa, synthetic construct
GPQPLAAAAGSRQGG

SEQ ID NO: 4677 - protein, 15 aa, synthetic construct
GRGRLDAAEATRDGG

SEQ ID NO: 4678 - protein, 15 aa, synthetic construct
GSGGGCGVTGEEAEN

SEQ ID NO: 4679 - protein, 15 aa, synthetic construct
KGNGKRLPLTSNWKC

SEQ ID NO: 4680 - protein, 15 aa, synthetic construct
LAARAPRSSRTCGRT

SEQ ID NO: 4681 - protein, 15 aa, synthetic construct
PGTPPSAWTQRRCPG

SEQ ID NO: 4682 - protein, 15 aa, synthetic construct
PHAPGPRAPRPAQTP

SEQ ID NO: 4683 - protein, 15 aa, synthetic construct
PPAEQLGCSPDPGQC

SEQ ID NO: 4684 - protein, 15 aa, synthetic construct
PPARPQPPRSHQLQL

SEQ ID NO: 4685 - protein, 15 aa, synthetic construct
PPASARPTPGVASKT

SEQ ID NO: 4686 - protein, 15 aa, synthetic construct
PPEPRAPGLRRRRAR

SEQ ID NO: 4687 - protein, 15 aa, synthetic construct
PTSGSSFHLSSIPPC

SEQ ID NO: 4688 - protein, 15 aa, synthetic construct
QCLLSHRYLSHVAFV

SEQ ID NO: 4689 - protein, 15 aa, synthetic construct
QDGGGRVRYSPAPAE

SEQ ID NO: 4690 - protein, 15 aa, synthetic construct
QEVPLLAGAGGGRPG

SEQ ID NO: 4691 - protein, 15 aa, synthetic construct
RAAPRARLLRGAEVD

SEQ ID NO: 4692 - protein, 15 aa, synthetic construct
RCSTSFTRTQRDRRA

SEQ ID NO: 4693 - protein, 15 aa, synthetic construct
RGAGETAVRRRCLHL

SEQ ID NO: 4694 - protein, 15 aa, synthetic construct
RGPARDPPLPEVDRA

SEQ ID NO: 4695 - protein, 15 aa, synthetic construct
RLHLLLLPLFVLSVL

SEQ ID NO: 4696 - protein, 15 aa, synthetic construct
RLLPRASCTCCSPTS

SEQ ID NO: 4697 - protein, 15 aa, synthetic construct
RRRRGGRALPGRRPS

SEQ ID NO: 4698 - protein, 15 aa, synthetic construct
RSSRPSCRTSRASST

SEQ ID NO: 4699 - protein, 15 aa, synthetic construct
SGPRRGSAPARSPPS

SEQ ID NO: 4700 - protein, 15 aa, synthetic construct
SQRLQPGLRPRPLAR

SEQ ID NO: 4701 - protein, 15 aa, synthetic construct
SRSAAPRGPRARRGG

SEQ ID NO: 4702 - protein, 15 aa, synthetic construct
SSVASFFKMRRMKPY

SEQ ID NO: 4703 - protein, 15 aa, synthetic construct
STVVTRRHRTQTWYL

SEQ ID NO: 4704 - protein, 15 aa, synthetic construct
TRAPGRRASATASAW

SEQ ID NO: 4705 - protein, 15 aa, synthetic construct
WAAGPAAPAPALRPG

SEQ ID NO: 4706 - protein, 15 aa, synthetic construct
WGFGGRKGQWLPMTR

SEQ ID NO: 4707 - protein, 15 aa, synthetic construct
WICPWAPARRGPATS

SEQ ID NO: 4708 - protein, 15 aa, synthetic construct
WRDPAAPGARSRRVF

SEQ ID NO: 4709 - protein, 15 aa, synthetic construct
WRDRPQEAGAFQKSL

SEQ ID NO: 4710 - protein, 15 aa, synthetic construct
WRLPKTSTSGSVTKR

SEQ ID NO: 4711 - protein, 15 aa, synthetic construct
WRPSGGCGRYRAVWV

SEQ ID NO: 4712 - protein, 15 aa, synthetic construct
WRPTAPARSSSRIKL

SEQ ID NO: 4713 - protein, 15 aa, synthetic construct
WSGGKFAGSARGLDG

SEQ ID NO: 4714 - protein, 15 aa, synthetic construct
WTATPRRRRRVATRR

SEQ ID NO: 4715 - protein, 15 aa, synthetic construct
YDDLKRVRSSVRSQR

SEQ ID NO: 4716 - protein, 15 aa, synthetic construct
AGPRKSPHPESRTPS

SEQ ID NO: 4717 - protein, 15 aa, synthetic construct
APSPASSSRPPSRRQ

SEQ ID NO: 4718 - protein, 15 aa, synthetic construct
ARPGPGPGPSPGGRK

SEQ ID NO: 4719 - protein, 15 aa, synthetic construct
ATCPARRPPALGGHS

SEQ ID NO: 4720 - protein, 15 aa, synthetic construct
CNVPCQAPASTWGPF

SEQ ID NO: 4721 - protein, 15 aa, synthetic construct
CPSPARSPPPPRGPG

SEQ ID NO: 4722 - protein, 15 aa, synthetic construct
CSPVASPLREVAASG

SEQ ID NO: 4723 - protein, 15 aa, synthetic construct
DGSLGVSKIGSEWPH

SEQ ID NO: 4724 - protein, 15 aa, synthetic construct
DLRPGLGLGRPLGLH

SEQ ID NO: 4725 - protein, 15 aa, synthetic construct
DQGDPNLQQPREAAA

SEQ ID NO: 4726 - protein, 15 aa, synthetic construct
DRDAAPGHPLHRPPI

SEQ ID NO: 4727 - protein, 15 aa, synthetic construct
ERRGAGEPGGAAGKA

SEQ ID NO: 4728 - protein, 15 aa, synthetic construct
GAGWTREGGGLLPGP

SEQ ID NO: 4729 - protein, 15 aa, synthetic construct
GAPGARGHSGIGGRG

SEQ ID NO: 4730 - protein, 15 aa, synthetic construct
GDGGPVSGSLGPPEM

SEQ ID NO: 4731 - protein, 15 aa, synthetic construct
GHQGGDPGTRVQVLA

SEQ ID NO: 4732 - protein, 15 aa, synthetic construct
GPAPGLFAGIPELGL

SEQ ID NO: 4733 - protein, 15 aa, synthetic construct
GPPRGVPLAPGRLPL

SEQ ID NO: 4734 - protein, 15 aa, synthetic construct
GPRTRRSGQSSTAGI

SEQ ID NO: 4735 - protein, 15 aa, synthetic construct
GRDNSGTHRRSAPGI

SEQ ID NO: 4736 - protein, 15 aa, synthetic construct
GVGNAFPEDARVAGG

SEQ ID NO: 4737 - protein, 15 aa, synthetic construct
LAGHALATAARGQAA

SEQ ID NO: 4738 - protein, 15 aa, synthetic construct
LSASLLGAGRPEPDQ

SEQ ID NO: 4739 - protein, 15 aa, synthetic construct
PSCLAMCWSSQPLPS

SEQ ID NO: 4740 - protein, 15 aa, synthetic construct
PSPDLLQPGRGGEDL

SEQ ID NO: 4741 - protein, 15 aa, synthetic construct
PSRRGSRDDAQTSAH

SEQ ID NO: 4742 - protein, 15 aa, synthetic construct
PSTPPLALSRRASRA

SEQ ID NO: 4743 - protein, 15 aa, synthetic construct
RGRRPEGEGRSAGGE

SEQ ID NO: 4744 - protein, 15 aa, synthetic construct
RHGDREHRQGCSTAA

SEQ ID NO: 4745 - protein, 15 aa, synthetic construct
RPAPASQPVVCPAPA

SEQ ID NO: 4746 - protein, 15 aa, synthetic construct
RRLGLPRWRPGGTQA

SEQ ID NO: 4747 - protein, 15 aa, synthetic construct
RRPRTPAATASELQL

SEQ ID NO: 4748 - protein, 15 aa, synthetic construct
RTSGRTAAERQRAGE

SEQ ID NO: 4749 - protein, 15 aa, synthetic construct
RVRRPCRQSRRLTSG

SEQ ID NO: 4750 - protein, 15 aa, synthetic construct
TAHAHAGPRPARVAP

SEQ ID NO: 4751 - protein, 15 aa, synthetic construct
TCTGSTSARTLWKAG

SEQ ID NO: 4752 - protein, 15 aa, synthetic construct
TRTGRALAPSSMTRA

SEQ ID NO: 4753 - protein, 15 aa, synthetic construct
TRTGVAILRPSRAPV

SEQ ID NO: 4754 - protein, 15 aa, synthetic construct
TTTIITSSLTNTCSM

SEQ ID NO: 4755 - protein, 15 aa, synthetic construct
TWTAASPATASASPS

SEQ ID NO: 4756 - protein, 15 aa, synthetic construct
TWTGRRTGTRPTRAA

SEQ ID NO: 4757 - protein, 15 aa, synthetic construct
VRLPRPPPLLPVLAV

SEQ ID NO: 4758 - protein, 15 aa, synthetic construct
VWKLFSLHEVSRRLW

SEQ ID NO: 4759 - protein, 15 aa, synthetic construct
WAASSPRDGRLTRSR

SEQ ID NO: 4760 - protein, 15 aa, synthetic construct
WRLRELVTLWILSVE

SEQ ID NO: 4761 - protein, 15 aa, synthetic construct
WRSRAARPCTSSFPS

SEQ ID NO: 4762 - protein, 15 aa, synthetic construct
AAAPSASGSGSLSSS

SEQ ID NO: 4763 - protein, 15 aa, synthetic construct
AALELGAAPGAAERR

SEQ ID NO: 4764 - protein, 15 aa, synthetic construct
AALLDLAAPVDPALD

SEQ ID NO: 4765 - protein, 15 aa, synthetic construct
AARRGQARAGSGRTS

SEQ ID NO: 4766 - protein, 15 aa, synthetic construct
ADALLRAGAARGLLG

SEQ ID NO: 4767 - protein, 15 aa, synthetic construct
AGAAHGAGGRPVRRA

SEQ ID NO: 4768 - protein, 15 aa, synthetic construct
AGGRLGLVGARPPAR

SEQ ID NO: 4769 - protein, 15 aa, synthetic construct
AGLAKPGRTAQVGAS

SEQ ID NO: 4770 - protein, 15 aa, synthetic construct
AGVLRGRASRCDPGA

SEQ ID NO: 4771 - protein, 15 aa, synthetic construct
AGWAPSCAARCPCGA

SEQ ID NO: 4772 - protein, 15 aa, synthetic construct
AICLCHDHFQPEQLQ

SEQ ID NO: 4773 - protein, 15 aa, synthetic construct
AILQLNPDGKWDYPG

SEQ ID NO: 4774 - protein, 15 aa, synthetic construct
ALEEAQEPGECPGGR

SEQ ID NO: 4775 - protein, 15 aa, synthetic construct
ALGGRGPLSEGGTEP

SEQ ID NO: 4776 - protein, 15 aa, synthetic construct
ALWGRAQLRAGAGAG

SEQ ID NO: 4777 - protein, 15 aa, synthetic construct
APGLPLRVRRAARHR

SEQ ID NO: 4778 - protein, 15 aa, synthetic construct
ARAAPTAAGSGCAAG

SEQ ID NO: 4779 - protein, 15 aa, synthetic construct
ARAGAGAGARAGART

SEQ ID NO: 4780 - protein, 15 aa, synthetic construct
ARAVGDRLFSRHCSG

SEQ ID NO: 4781 - protein, 15 aa, synthetic construct
ARPGHRRGEDPFLRR

SEQ ID NO: 4782 - protein, 15 aa, synthetic construct
ASGTSLAVPVKSRWL

SEQ ID NO: 4783 - protein, 15 aa, synthetic construct
ASLPSPCGFCARSAS

SEQ ID NO: 4784 - protein, 15 aa, synthetic construct
AVGFESGGSGAERVP

SEQ ID NO: 4785 - protein, 15 aa, synthetic construct
AVHRRPQAVRHPGAH

SEQ ID NO: 4786 - protein, 15 aa, synthetic construct
AVLEPPGRSVTAPKR

SEQ ID NO: 4787 - protein, 15 aa, synthetic construct
AVNVPAADGGGGRAD

SEQ ID NO: 4788 - protein, 15 aa, synthetic construct
AYKQEQADFTTRNSL

SEQ ID NO: 4789 - protein, 15 aa, synthetic construct
CAPQKLSKRWTPSKP

SEQ ID NO: 4790 - protein, 15 aa, synthetic construct
CAWRERAAQRGRDRT

SEQ ID NO: 4791 - protein, 15 aa, synthetic construct
CCGKLHPSLPHCGGA

SEQ ID NO: 4792 - protein, 15 aa, synthetic construct
CCSSPSSSSSASWSP

SEQ ID NO: 4793 - protein, 15 aa, synthetic construct
CCWRRRRRCGCERSR

SEQ ID NO: 4794 - protein, 15 aa, synthetic construct
CGQRKPGRPPRPRNP

SEQ ID NO: 4795 - protein, 15 aa, synthetic construct
CGRPTRARGSASASS

SEQ ID NO: 4796 - protein, 15 aa, synthetic construct
CLSRSSAGSGTGVWR

SEQ ID NO: 4797 - protein, 15 aa, synthetic construct
CPRGFRSCGRRDAGA

SEQ ID NO: 4798 - protein, 15 aa, synthetic construct
CQARPPTRGRSLSAT

SEQ ID NO: 4799 - protein, 15 aa, synthetic construct
CRRAVHAQQQPEGAQ

SEQ ID NO: 4800 - protein, 15 aa, synthetic construct
CSLFIMSAQYPAPSG

SEQ ID NO: 4801 - protein, 15 aa, synthetic construct
CSRPGPPGRRAVTLP

SEQ ID NO: 4802 - protein, 15 aa, synthetic construct
CWGPCLGPAPPCPPT

SEQ ID NO: 4803 - protein, 15 aa, synthetic construct
CWVSMAPPSSQQHSS

SEQ ID NO: 4804 - protein, 15 aa, synthetic construct
DCCCCCCRRRSGDPG

SEQ ID NO: 4805 - protein, 15 aa, synthetic construct
DDAGRGGGRGGGPPR

SEQ ID NO: 4806 - protein, 15 aa, synthetic construct
DGPLLGPVVSLVSPL

SEQ ID NO: 4807 - protein, 15 aa, synthetic construct
DPGGDPLLAGLPADP

SEQ ID NO: 4808 - protein, 15 aa, synthetic construct
DRHSWDTNRPHLGCP

SEQ ID NO: 4809 - protein, 15 aa, synthetic construct
DSDQLHPGDRVYSCG

SEQ ID NO: 4810 - protein, 15 aa, synthetic construct
EARRGAARGRGRVQW

SEQ ID NO: 4811 - protein, 15 aa, synthetic construct
EDGCVSEGRGLLRRP

SEQ ID NO: 4812 - protein, 15 aa, synthetic construct
EGARRGGHPLVGGSQ

SEQ ID NO: 4813 - protein, 15 aa, synthetic construct
EPLSFCITLFPGDLT

SEQ ID NO: 4814 - protein, 15 aa, synthetic construct
EQPETARPGAGARAR

SEQ ID NO: 4815 - protein, 15 aa, synthetic construct
ERAPHCPWTISARSS

SEQ ID NO: 4816 - protein, 15 aa, synthetic construct
EWLRGERGSTERVRE

SEQ ID NO: 4817 - protein, 15 aa, synthetic construct
FQFLVFLVEFGRGHE

SEQ ID NO: 4818 - protein, 15 aa, synthetic construct
FSWAQGFRCSSLGSS

SEQ ID NO: 4819 - protein, 15 aa, synthetic construct
GAAEFGGAAGNVEAP

SEQ ID NO: 4820 - protein, 15 aa, synthetic construct
GAAGGPGTERHATPA

SEQ ID NO: 4821 - protein, 15 aa, synthetic construct
GAGRAGAFLRGGGRA

SEQ ID NO: 4822 - protein, 15 aa, synthetic construct
GDQEGRLAAGDGDRA

SEQ ID NO: 4823 - protein, 15 aa, synthetic construct
GGAGVGGSVVHDPEG

SEQ ID NO: 4824 - protein, 15 aa, synthetic construct
GGARRSAPRRGSPGP

SEQ ID NO: 4825 - protein, 15 aa, synthetic construct
GGGAGVGAGGRVGAG

SEQ ID NO: 4826 - protein, 15 aa, synthetic construct
GGRSSWWEIQKHSQQ

SEQ ID NO: 4827 - protein, 15 aa, synthetic construct
GHPGHGAVRHGRGGA

SEQ ID NO: 4828 - protein, 15 aa, synthetic construct
GHPGRATARAPWAAR

SEQ ID NO: 4829 - protein, 15 aa, synthetic construct
GHSKYHGPCQAWLPP

SEQ ID NO: 4830 - protein, 15 aa, synthetic construct
GKQSDLDHRSHPVGI

SEQ ID NO: 4831 - protein, 15 aa, synthetic construct
GPCEDDGPRPPRPGR

SEQ ID NO: 4832 - protein, 15 aa, synthetic construct
GPHPEAILPHPGEAA

SEQ ID NO: 4833 - protein, 15 aa, synthetic construct
GPYAVPEALQQEDRA

SEQ ID NO: 4834 - protein, 15 aa, synthetic construct
GRARPRRPGPRLRVQ

SEQ ID NO: 4835 - protein, 15 aa, synthetic construct
GRATLQRGGFGAGAG

SEQ ID NO: 4836 - protein, 15 aa, synthetic construct
GRLLLRGGPWRGIHV

SEQ ID NO: 4837 - protein, 15 aa, synthetic construct
GRRGRRRRGWPDPGA

SEQ ID NO: 4838 - protein, 15 aa, synthetic construct
GRVQGQGVHRRSLRG

SEQ ID NO: 4839 - protein, 15 aa, synthetic construct
GSRLPEQLYRRGAWL

SEQ ID NO: 4840 - protein, 15 aa, synthetic construct
GSRRCCVRLRLSGGH

SEQ ID NO: 4841 - protein, 15 aa, synthetic construct
GVGAAVPCSRPPHHR

SEQ ID NO: 4842 - protein, 15 aa, synthetic construct
GVPPGEPVQHTSGAV

SEQ ID NO: 4843 - protein, 15 aa, synthetic construct
HGGGGGGTSRDPGRF

SEQ ID NO: 4844 - protein, 15 aa, synthetic construct
HPCRRLVASVHARPP

SEQ ID NO: 4845 - protein, 15 aa, synthetic construct
HPQSAERAGAAPERV

SEQ ID NO: 4846 - protein, 15 aa, synthetic construct
LAHGTKCLSASWGPG

SEQ ID NO: 4847 - protein, 15 aa, synthetic construct
LHQLPHEGSVPLLPP

SEQ ID NO: 4848 - protein, 15 aa, synthetic construct
LIYLSFHSSRQSGFD

SEQ ID NO: 4849 - protein, 15 aa, synthetic construct
LPLLPPLQTPLQHLP

SEQ ID NO: 4850 - protein, 15 aa, synthetic construct
PCSISSPCWGTGPSW

SEQ ID NO: 4851 - protein, 15 aa, synthetic construct
PCVDWNSLLYHLHCS

SEQ ID NO: 4852 - protein, 15 aa, synthetic construct
PGGRGAPGGCRCASG

SEQ ID NO: 4853 - protein, 15 aa, synthetic construct
PGNPAPPSRRHPRPR

SEQ ID NO: 4854 - protein, 15 aa, synthetic construct
PGRRLPRRGAAVRPG

SEQ ID NO: 4855 - protein, 15 aa, synthetic construct
PHRSSGVEDAPLCAI

SEQ ID NO: 4856 - protein, 15 aa, synthetic construct
PLRAGATEAALGGVH

SEQ ID NO: 4857 - protein, 15 aa, synthetic construct
PPLHAHAWAPGAGAG

SEQ ID NO: 4858 - protein, 15 aa, synthetic construct
PPTTRVAPAAAVPAV

SEQ ID NO: 4859 - protein, 15 aa, synthetic construct
PRGPRDPQPASSAWT

SEQ ID NO: 4860 - protein, 15 aa, synthetic construct
PRKKSVPGSKALRAA

SEQ ID NO: 4861 - protein, 15 aa, synthetic construct
QASSPILPSPGFSLQ

SEQ ID NO: 4862 - protein, 15 aa, synthetic construct
QGTETRASLTPSGAS

SEQ ID NO: 4863 - protein, 15 aa, synthetic construct
QLWGGRRRPKAPGAH

SEQ ID NO: 4864 - protein, 15 aa, synthetic construct
QPLPARGRPGAPGRS

SEQ ID NO: 4865 - protein, 15 aa, synthetic construct
RAAPGTRSLRAVRGR

SEQ ID NO: 4866 - protein, 15 aa, synthetic construct
RADGLRQDVGRHQDG

SEQ ID NO: 4867 - protein, 15 aa, synthetic construct
RAPRPGHRPRPLGCP

SEQ ID NO: 4868 - protein, 15 aa, synthetic construct
RARGEDPRLVPEAGA

SEQ ID NO: 4869 - protein, 15 aa, synthetic construct
RCCCWEDGSAGAGGG

SEQ ID NO: 4870 - protein, 15 aa, synthetic construct
RCPRCWRTSCIQPSP

SEQ ID NO: 4871 - protein, 15 aa, synthetic construct
RDPGGGGGGGVPHGG

SEQ ID NO: 4872 - protein, 15 aa, synthetic construct
RGAAGAAGGLRGVRG

SEQ ID NO: 4873 - protein, 15 aa, synthetic construct
RGRQRRIQRLRGRGD

SEQ ID NO: 4874 - protein, 15 aa, synthetic construct
RGSCVACRGVRGEDG

SEQ ID NO: 4875 - protein, 15 aa, synthetic construct
RPAAAAQAEPLRGGG

SEQ ID NO: 4876 - protein, 15 aa, synthetic construct
RRGGRAAGGPEPRDL

SEQ ID NO: 4877 - protein, 15 aa, synthetic construct
RRGPAIGPAPGFPGS

SEQ ID NO: 4878 - protein, 15 aa, synthetic construct
RRRASRRLPAGRGPG

SEQ ID NO: 4879 - protein, 15 aa, synthetic construct
SAAALPAAHGLPRRV

SEQ ID NO: 4880 - protein, 15 aa, synthetic construct
SGGWRCWRRSSTKLL

SEQ ID NO: 4881 - protein, 15 aa, synthetic construct
SIPKEAATTSSTGMA

SEQ ID NO: 4882 - protein, 15 aa, synthetic construct
SLASQGWSPYTSGSP

SEQ ID NO: 4883 - protein, 15 aa, synthetic construct
SRTLHSGRDPRPGAI

SEQ ID NO: 4884 - protein, 15 aa, synthetic construct
SSHTWLSSTSPTPAT

SEQ ID NO: 4885 - protein, 15 aa, synthetic construct
STSCPAPTSSSARCP

SEQ ID NO: 4886 - protein, 15 aa, synthetic construct
STWFSSPFALDSALQ

SEQ ID NO: 4887 - protein, 15 aa, synthetic construct
VAIQPAEGVQMRGPG

SEQ ID NO: 4888 - protein, 15 aa, synthetic construct
VAPSSRAVCARCKDQ

SEQ ID NO: 4889 - protein, 15 aa, synthetic construct
VARGDVDAGVSGALD

SEQ ID NO: 4890 - protein, 15 aa, synthetic construct
VPPKKQPTDQQPTRQ

SEQ ID NO: 4891 - protein, 15 aa, synthetic construct
WARPAATPGTQIAGS

SEQ ID NO: 4892 - protein, 15 aa, synthetic construct
WASRAWSCAPWPWWC

SEQ ID NO: 4893 - protein, 15 aa, synthetic construct
WAWRVFSRTPLTSSS

SEQ ID NO: 4894 - protein, 15 aa, synthetic construct
WGKIRQWSQSSSYWD

SEQ ID NO: 4895 - protein, 15 aa, synthetic construct
WHMGQSVCQHRGDPG

SEQ ID NO: 4896 - protein, 15 aa, synthetic construct
WLCPGGAGSPTKGLN

SEQ ID NO: 4897 - protein, 15 aa, synthetic construct
WLGRAGCSFCGWAAS

SEQ ID NO: 4898 - protein, 15 aa, synthetic construct
WLTSIAPRRQSLFLW

SEQ ID NO: 4899 - protein, 15 aa, synthetic construct
WMWICSWERSIQTKR

SEQ ID NO: 4900 - protein, 15 aa, synthetic construct
WPLRCSRSSSARGPG

SEQ ID NO: 4901 - protein, 15 aa, synthetic construct
WPLRGRWPAPASPRP

SEQ ID NO: 4902 - protein, 15 aa, synthetic construct
WPQQVPWTMPGMASS

SEQ ID NO: 4903 - protein, 15 aa, synthetic construct
WPSSGSGCPPEKPSG

SEQ ID NO: 4904 - protein, 15 aa, synthetic construct
WPTLRSCRFLRRPRR

SEQ ID NO: 4905 - protein, 15 aa, synthetic construct
WRGTGMRLRNVSRSP

SEQ ID NO: 4906 - protein, 15 aa, synthetic construct
WRKPTTALKRDFFSW

SEQ ID NO: 4907 - protein, 15 aa, synthetic construct
WRPDFLQLTRSCPGA

SEQ ID NO: 4908 - protein, 15 aa, synthetic construct
WRPRRQARGWRRRSS

SEQ ID NO: 4909 - protein, 15 aa, synthetic construct
WRQKQLVGNTEAQSA

SEQ ID NO: 4910 - protein, 15 aa, synthetic construct
WSSSWGTRSAHQWGS

SEQ ID NO: 4911 - protein, 15 aa, synthetic construct
WSVPAVPNARPRPLP

SEQ ID NO: 4912 - protein, 15 aa, synthetic construct
WTSHPSARRLWSRRW

SEQ ID NO: 4913 - protein, 15 aa, synthetic construct
WVTGALELLHGLMAN

SEQ ID NO: 4914 - protein, 15 aa, synthetic construct
AAAAAAATRTAWSST

SEQ ID NO: 4915 - protein, 15 aa, synthetic construct
AAVRPSASGAPHPAT

SEQ ID NO: 4916 - protein, 15 aa, synthetic construct
AHEARRALHPGQGPS

SEQ ID NO: 4917 - protein, 15 aa, synthetic construct
ALATDFLAFYHFELY

SEQ ID NO: 4918 - protein, 15 aa, synthetic construct
ANLPAPRGAAALART

SEQ ID NO: 4919 - protein, 15 aa, synthetic construct
ANRPRGTRRWPSVSW

SEQ ID NO: 4920 - protein, 15 aa, synthetic construct
ANSPKRPSQLFSQKE

SEQ ID NO: 4921 - protein, 15 aa, synthetic construct
APAAPGRAGAPAASA

SEQ ID NO: 4922 - protein, 15 aa, synthetic construct
APAKSAARPLAMRAG

SEQ ID NO: 4923 - protein, 15 aa, synthetic construct
APALPGGGSAAHGGG

SEQ ID NO: 4924 - protein, 15 aa, synthetic construct
APALRRCRRSRLCTA

SEQ ID NO: 4925 - protein, 15 aa, synthetic construct
APAPAGRLRRLGQPR

SEQ ID NO: 4926 - protein, 15 aa, synthetic construct
APARCPHCPLRPTLM

SEQ ID NO: 4927 - protein, 15 aa, synthetic construct
APARQPLGLRVRAAP

SEQ ID NO: 4928 - protein, 15 aa, synthetic construct
APARTSSQEGLGFAA

SEQ ID NO: 4929 - protein, 15 aa, synthetic construct
APASEKLVTKRPQKG

SEQ ID NO: 4930 - protein, 15 aa, synthetic construct
APATPAAASGGQRER

SEQ ID NO: 4931 - protein, 15 aa, synthetic construct
APAVAPVGAPRGTVA

SEQ ID NO: 4932 - protein, 15 aa, synthetic construct
APGLRALRQAAAEEP

SEQ ID NO: 4933 - protein, 15 aa, synthetic construct
APKQAQPPLPSELSA

SEQ ID NO: 4934 - protein, 15 aa, synthetic construct
APLAAQRQLRGAGGG

SEQ ID NO: 4935 - protein, 15 aa, synthetic construct
APLDGARPGPELAAG

SEQ ID NO: 4936 - protein, 15 aa, synthetic construct
APLLLRRGRRQAGAG

SEQ ID NO: 4937 - protein, 15 aa, synthetic construct
APLPPGRARLPPPQT

SEQ ID NO: 4938 - protein, 15 aa, synthetic construct
APLQRGGRLAARAAA

SEQ ID NO: 4939 - protein, 15 aa, synthetic construct
APMPRGGHGRGARGP

SEQ ID NO: 4940 - protein, 15 aa, synthetic construct
APQRARAQPRQVGQP

SEQ ID NO: 4941 - protein, 15 aa, synthetic construct
APQRGRSPRRCVLGR

SEQ ID NO: 4942 - protein, 15 aa, synthetic construct
APQRSGDPPRGQIHP

SEQ ID NO: 4943 - protein, 15 aa, synthetic construct
APRAAAAATAAAPQP

SEQ ID NO: 4944 - protein, 15 aa, synthetic construct
APRAPGSPGATAARG

SEQ ID NO: 4945 - protein, 15 aa, synthetic construct
APRAQGHHRGALPGR

SEQ ID NO: 4946 - protein, 15 aa, synthetic construct
APRAVSPAPATHPRA

SEQ ID NO: 4947 - protein, 15 aa, synthetic construct
APRGAVAPVGVPRGA

SEQ ID NO: 4948 - protein, 15 aa, synthetic construct
APRGGQRVREPGAPH

SEQ ID NO: 4949 - protein, 15 aa, synthetic construct
APRLPGEAQQEVHAR

SEQ ID NO: 4950 - protein, 15 aa, synthetic construct
APRLPGQESASTAPQ

SEQ ID NO: 4951 - protein, 15 aa, synthetic construct
APRLVGAPLPAARPA

SEQ ID NO: 4952 - protein, 15 aa, synthetic construct
APRPARLPALPAAAA

SEQ ID NO: 4953 - protein, 15 aa, synthetic construct
APRPGPGAQDPALQS

SEQ ID NO: 4954 - protein, 15 aa, synthetic construct
APRPGRTGAGGGRGR

SEQ ID NO: 4955 - protein, 15 aa, synthetic construct
APRPRDEAGGGRDVP

SEQ ID NO: 4956 - protein, 15 aa, synthetic construct
APRPRPRRPRSTPTS

SEQ ID NO: 4957 - protein, 15 aa, synthetic construct
APRPRQSTCPHRGCP

SEQ ID NO: 4958 - protein, 15 aa, synthetic construct
APRPRRPPVASAPAA

SEQ ID NO: 4959 - protein, 15 aa, synthetic construct
APRPRTPRASASATS

SEQ ID NO: 4960 - protein, 15 aa, synthetic construct
APRPSAAPRLLPHRA

SEQ ID NO: 4961 - protein, 15 aa, synthetic construct
APRPSLPAAAAAPAR

SEQ ID NO: 4962 - protein, 15 aa, synthetic construct
APRPSPRPGSGPRRR

SEQ ID NO: 4963 - protein, 15 aa, synthetic construct
APRQPPPAGPRRPPD

SEQ ID NO: 4964 - protein, 15 aa, synthetic construct
APRQQRLHQVPAWLG

SEQ ID NO: 4965 - protein, 15 aa, synthetic construct
APRRAAFAAPPGRAA

SEQ ID NO: 4966 - protein, 15 aa, synthetic construct
APRRAAFEKAARLVQ

SEQ ID NO: 4967 - protein, 15 aa, synthetic construct
APRRACTTGSRAGPS

SEQ ID NO: 4968 - protein, 15 aa, synthetic construct
APRRAGARGGRSRSR

SEQ ID NO: 4969 - protein, 15 aa, synthetic construct
APRRALPTRGVVGGP

SEQ ID NO: 4970 - protein, 15 aa, synthetic construct
APRRRLQCRRPGPGP

SEQ ID NO: 4971 - protein, 15 aa, synthetic construct
APRSRRAADSASSTA

SEQ ID NO: 4972 - protein, 15 aa, synthetic construct
APRVPGEEAVRLHVQ

SEQ ID NO: 4973 - protein, 15 aa, synthetic construct
APSPRSTTTAPTPSS

SEQ ID NO: 4974 - protein, 15 aa, synthetic construct
APSRGAMASARPAAG

SEQ ID NO: 4975 - protein, 15 aa, synthetic construct
APSRGTPGAPCAAAA

SEQ ID NO: 4976 - protein, 15 aa, synthetic construct
APSRSTSSSAAAACP

SEQ ID NO: 4977 - protein, 15 aa, synthetic construct
APTLPSRWRRRTAAP

SEQ ID NO: 4978 - protein, 15 aa, synthetic construct
APTLRRRWRRRGGPG

SEQ ID NO: 4979 - protein, 15 aa, synthetic construct
APTRTATPSTGTAAT

SEQ ID NO: 4980 - protein, 15 aa, synthetic construct
APVAAAGQQPERERG

SEQ ID NO: 4981 - protein, 15 aa, synthetic construct
APVAAAPRQPHHGGD

SEQ ID NO: 4982 - protein, 15 aa, synthetic construct
APVAAASDPHPYPAA

SEQ ID NO: 4983 - protein, 15 aa, synthetic construct
APVFGRGRLHPSWAL

SEQ ID NO: 4984 - protein, 15 aa, synthetic construct
APVHSEVYQEPLQGG

SEQ ID NO: 4985 - protein, 15 aa, synthetic construct
APVLSVAAPVPGHGN

SEQ ID NO: 4986 - protein, 15 aa, synthetic construct
APVPQGKGIPPGRLS

SEQ ID NO: 4987 - protein, 15 aa, synthetic construct
APVPVGFQRPRGPSG

SEQ ID NO: 4988 - protein, 15 aa, synthetic construct
ARRPRRVAPSWLPSA

SEQ ID NO: 4989 - protein, 15 aa, synthetic construct
ASPDRRISKKSSLSL

SEQ ID NO: 4990 - protein, 15 aa, synthetic construct
AVFEVSKTETKLLSY

SEQ ID NO: 4991 - protein, 15 aa, synthetic construct
CTRGSWGSRPCCRRP

SEQ ID NO: 4992 - protein, 15 aa, synthetic construct
EGPVHGPRGRGEGGR

SEQ ID NO: 4993 - protein, 15 aa, synthetic construct
GAGFREQLFSSCVLH

SEQ ID NO: 4994 - protein, 15 aa, synthetic construct
GAVGASGAPQLRRVQ

SEQ ID NO: 4995 - protein, 15 aa, synthetic construct
GAYHLYPETGHLHPD

SEQ ID NO: 4996 - protein, 15 aa, synthetic construct
GEGPEVGPGTEEPAH

SEQ ID NO: 4997 - protein, 15 aa, synthetic construct
GGDADPGARGPLLLG

SEQ ID NO: 4998 - protein, 15 aa, synthetic construct
GGQGPPEPALARAAG

SEQ ID NO: 4999 - protein, 15 aa, synthetic construct
GPRGGCPGARAGGGG

SEQ ID NO: 5000 - protein, 15 aa, synthetic construct
HADPGRAPLREAWPH

SEQ ID NO: 5001 - protein, 15 aa, synthetic construct
PQLPKPPLALQRCKD

SEQ ID NO: 5002 - protein, 15 aa, synthetic construct
RAGEPAPRAGRPALR

SEQ ID NO: 5003 - protein, 15 aa, synthetic construct
RGPPRRAPPRRRPRA

SEQ ID NO: 5004 - protein, 15 aa, synthetic construct
SPQSPPRPWGRAEGA

SEQ ID NO: 5005 - protein, 15 aa, synthetic construct
VPAHRAQRRLRALPL

SEQ ID NO: 5006 - protein, 15 aa, synthetic construct
VPANVLPVRRGAHRP

SEQ ID NO: 5007 - protein, 15 aa, synthetic construct
VPAPELEPGPRLPAG

SEQ ID NO: 5008 - protein, 15 aa, synthetic construct
VPAPLRVLQPPGLPQ

SEQ ID NO: 5009 - protein, 15 aa, synthetic construct
VPAPRALWLGHRIPP

SEQ ID NO: 5010 - protein, 15 aa, synthetic construct
VPAPTPRPSGQHEAP

SEQ ID NO: 5011 - protein, 15 aa, synthetic construct
VPAPVRPREKKANQC

SEQ ID NO: 5012 - protein, 15 aa, synthetic construct
VPAQLRLPDPQGAVR

SEQ ID NO: 5013 - protein, 15 aa, synthetic construct
VPAQPGCGPASRPLP

SEQ ID NO: 5014 - protein, 15 aa, synthetic construct
VPARDGDPGSPAHSH

SEQ ID NO: 5015 - protein, 15 aa, synthetic construct
VPATRCAAARLSRTR

SEQ ID NO: 5016 - protein, 15 aa, synthetic construct
VPAVRGGGDAPRRQL

SEQ ID NO: 5017 - protein, 15 aa, synthetic construct
VPGRPVPAQPAAGEG

SEQ ID NO: 5018 - protein, 15 aa, synthetic construct
VPHPSVPQRAQHSVC

SEQ ID NO: 5019 - protein, 15 aa, synthetic construct
VPKGPAGERAQAERL

SEQ ID NO: 5020 - protein, 15 aa, synthetic construct
VPKGQPLASPPDASA

SEQ ID NO: 5021 - protein, 15 aa, synthetic construct
VPKIAKELGFQPESG

SEQ ID NO: 5022 - protein, 15 aa, synthetic construct
VPLHPPVAVQPSCGE

SEQ ID NO: 5023 - protein, 15 aa, synthetic construct
VPLHQGRLQGAPGPD

SEQ ID NO: 5024 - protein, 15 aa, synthetic construct
VPLPGQSAAAVPGRA

SEQ ID NO: 5025 - protein, 15 aa, synthetic construct
VPLPPPPSLSLAPRC

SEQ ID NO: 5026 - protein, 15 aa, synthetic construct
VPLRHHGPGLHPDER

SEQ ID NO: 5027 - protein, 15 aa, synthetic construct
VPLRPRCRSRAPPFG

SEQ ID NO: 5028 - protein, 15 aa, synthetic construct
VPPKPGGAGCLRSEP

SEQ ID NO: 5029 - protein, 15 aa, synthetic construct
VPPRRQHRRLTRLRD

SEQ ID NO: 5030 - protein, 15 aa, synthetic construct
VPPRRSSQGLYVGRC

SEQ ID NO: 5031 - protein, 15 aa, synthetic construct
VPQRGRGTSQEAGDA

SEQ ID NO: 5032 - protein, 15 aa, synthetic construct
VPQRLRAAPARSAHA

SEQ ID NO: 5033 - protein, 15 aa, synthetic construct
VPQRSRGPGLAFGYA

SEQ ID NO: 5034 - protein, 15 aa, synthetic construct
VPRAAVAACPATCAD

SEQ ID NO: 5035 - protein, 15 aa, synthetic construct
VPRAGASPRRSLSSA

SEQ ID NO: 5036 - protein, 15 aa, synthetic construct
VPRAPLRAEPAPPLR

SEQ ID NO: 5037 - protein, 15 aa, synthetic construct
VPRASFGPLAGAAGH

SEQ ID NO: 5038 - protein, 15 aa, synthetic construct
VPRATSSGTAGARTS

SEQ ID NO: 5039 - protein, 15 aa, synthetic construct
VPRAVRVPLGGAQRA

SEQ ID NO: 5040 - protein, 15 aa, synthetic construct
VPRAVSPAAGQGYSE

SEQ ID NO: 5041 - protein, 15 aa, synthetic construct
VPRCQPPQRPGAAGH

SEQ ID NO: 5042 - protein, 15 aa, synthetic construct
VPRGAVAPVGVPRGA

SEQ ID NO: 5043 - protein, 15 aa, synthetic construct
VPRGPEQPLVPGGGR

SEQ ID NO: 5044 - protein, 15 aa, synthetic construct
VPRGPPGRPGTAPRP

SEQ ID NO: 5045 - protein, 15 aa, synthetic construct
VPRGRGLPAGGGAAL

SEQ ID NO: 5046 - protein, 15 aa, synthetic construct
VPRHRLQPDPHAQPA

SEQ ID NO: 5047 - protein, 15 aa, synthetic construct
VPRLCGAGGRARVPV

SEQ ID NO: 5048 - protein, 15 aa, synthetic construct
VPRLGDPGGHWRARA

SEQ ID NO: 5049 - protein, 15 aa, synthetic construct
VPRLPTPLGPGGLGH

SEQ ID NO: 5050 - protein, 15 aa, synthetic construct
VPRLRGTRPELRERR

SEQ ID NO: 5051 - protein, 15 aa, synthetic construct
VPRRALRRPLQQQSQ

SEQ ID NO: 5052 - protein, 15 aa, synthetic construct
VPRRCCVQPRGPEGS

SEQ ID NO: 5053 - protein, 15 aa, synthetic construct
VPRREREAAARARGS

SEQ ID NO: 5054 - protein, 15 aa, synthetic construct
VPRSAPGEPGGSAGA

SEQ ID NO: 5055 - protein, 15 aa, synthetic construct
VPRSVGLSVPLYSSV

SEQ ID NO: 5056 - protein, 15 aa, synthetic construct
VPRVPGALSRRRRAA

SEQ ID NO: 5057 - protein, 15 aa, synthetic construct
VPRWGTEWPAPAKKT

SEQ ID NO: 5058 - protein, 15 aa, synthetic construct
VPSKIGSPSAPGGRS

SEQ ID NO: 5059 - protein, 15 aa, synthetic construct
VPSLRGVRAAQRLGR

SEQ ID NO: 5060 - protein, 15 aa, synthetic construct
VPSMRGIFTERLPTQ

SEQ ID NO: 5061 - protein, 15 aa, synthetic construct
VPSPQKPRQESVAGR

SEQ ID NO: 5062 - protein, 15 aa, synthetic construct
VPSRPFSADPGYRVP

SEQ ID NO: 5063 - protein, 15 aa, synthetic construct
VPSRRPRQPPGCSPS

SEQ ID NO: 5064 - protein, 15 aa, synthetic construct
VPTASPGGSRGQGPG

SEQ ID NO: 5065 - protein, 15 aa, synthetic construct
VPTEPVSRRPSPGGL

SEQ ID NO: 5066 - protein, 15 aa, synthetic construct
VPTQVDGSRLPQPRR

SEQ ID NO: 5067 - protein, 15 aa, synthetic construct
VPTRGHPSGHRQQEP

SEQ ID NO: 5068 - protein, 15 aa, synthetic construct
VPTRRAAPAPSCTAR

SEQ ID NO: 5069 - protein, 15 aa, synthetic construct
VPVLCAKAHPPGAGQ

SEQ ID NO: 5070 - protein, 15 aa, synthetic construct
VPVLVRRLLRRRAGA

SEQ ID NO: 5071 - protein, 15 aa, synthetic construct
VPVPRTHGSGQRAGV

SEQ ID NO: 5072 - protein, 15 aa, synthetic construct
VPVQPDREGIAGVDK

SEQ ID NO: 5073 - protein, 15 aa, synthetic construct
VPVRRRGERQRGDRD

SEQ ID NO: 5074 - protein, 15 aa, synthetic construct
VPVSRSRGQGAKAAG

SEQ ID NO: 5075 - protein, 15 aa, synthetic construct
VPVWRPGGGCFEAEA

SEQ ID NO: 5076 - protein, 15 aa, synthetic construct
WKHLTTKCYPCENSY

SEQ ID NO: 5077 - protein, 15 aa, synthetic construct
WRRVRLPHRTLRPQR

SEQ ID NO: 5078 - protein, 15 aa, synthetic construct
AAQGPAAAPAHAREA

SEQ ID NO: 5079 - protein, 15 aa, synthetic construct
AGAAARQRLPGSRQV

SEQ ID NO: 5080 - protein, 15 aa, synthetic construct
AGRRLRAAGCPAGRA

SEQ ID NO: 5081 - protein, 15 aa, synthetic construct
AHQVREHDQLSGAGA

SEQ ID NO: 5082 - protein, 15 aa, synthetic construct
AHRPVGAALHLFRAD

SEQ ID NO: 5083 - protein, 15 aa, synthetic construct
ALAGAGPAGPQHWPA

SEQ ID NO: 5084 - protein, 15 aa, synthetic construct
ALRPPAVQLRQQEFS

SEQ ID NO: 5085 - protein, 15 aa, synthetic construct
ALRPPRAGAGRGQLG

SEQ ID NO: 5086 - protein, 15 aa, synthetic construct
APGEPLLPILLPGHR

SEQ ID NO: 5087 - protein, 15 aa, synthetic construct
ARRPAPAAPAAPGRA

SEQ ID NO: 5088 - protein, 15 aa, synthetic construct
ARRPPGPRRPIRAAA

SEQ ID NO: 5089 - protein, 15 aa, synthetic construct
AVLLKRRDASPGAHP

SEQ ID NO: 5090 - protein, 15 aa, synthetic construct
AVVPAAGGGGVLEQP

SEQ ID NO: 5091 - protein, 15 aa, synthetic construct
CLLRSRRAFLGPRVS

SEQ ID NO: 5092 - protein, 15 aa, synthetic construct
CPCETRAGKKNVLNT

SEQ ID NO: 5093 - protein, 15 aa, synthetic construct
CRRPRCGWRWCARAT

SEQ ID NO: 5094 - protein, 15 aa, synthetic construct
ERNMGTRAKSRRRPS

SEQ ID NO: 5095 - protein, 15 aa, synthetic construct
GAAGPGVPATRAAAA

SEQ ID NO: 5096 - protein, 15 aa, synthetic construct
GAAGRTLAEAAARGQ

SEQ ID NO: 5097 - protein, 15 aa, synthetic construct
GAHQAQLSAGSFQAR

SEQ ID NO: 5098 - protein, 15 aa, synthetic construct
GEPRGQPRHQKGSAE

SEQ ID NO: 5099 - protein, 15 aa, synthetic construct
GGAGRATGRAACAGH

SEQ ID NO: 5100 - protein, 15 aa, synthetic construct
GGAHSVLLPHQGAVR

SEQ ID NO: 5101 - protein, 15 aa, synthetic construct
GGGGRLWWRGRGGGP

SEQ ID NO: 5102 - protein, 15 aa, synthetic construct
GLLREHRHRGRHAAP

SEQ ID NO: 5103 - protein, 15 aa, synthetic construct
GRAEPRGPGRRRGPG

SEQ ID NO: 5104 - protein, 15 aa, synthetic construct
GSFESFSLLPFSSAE

SEQ ID NO: 5105 - protein, 15 aa, synthetic construct
HGQPGEAAHLPHLPG

SEQ ID NO: 5106 - protein, 15 aa, synthetic construct
KARRDGFAVRSQCRS

SEQ ID NO: 5107 - protein, 15 aa, synthetic construct
LAAPGAAVRAEVAHP

SEQ ID NO: 5108 - protein, 15 aa, synthetic construct
LWRLRLPGLLYLPQP

SEQ ID NO: 5109 - protein, 15 aa, synthetic construct
PVLALRAHVHRPGLD

SEQ ID NO: 5110 - protein, 15 aa, synthetic construct
QAGATRRAALGGARL

SEQ ID NO: 5111 - protein, 15 aa, synthetic construct
RAAGAVRLPQPPALL

SEQ ID NO: 5112 - protein, 15 aa, synthetic construct
RRQPRAGRGRRGGGR

SEQ ID NO: 5113 - protein, 15 aa, synthetic construct
RRTRAGRRQRGPGAG

SEQ ID NO: 5114 - protein, 15 aa, synthetic construct
RTLTLPLPSARPPAA

SEQ ID NO: 5115 - protein, 15 aa, synthetic construct
RTVGVLRRPKHRVPA

SEQ ID NO: 5116 - protein, 15 aa, synthetic construct
STRRDRRRKAAEPGE

SEQ ID NO: 5117 - protein, 15 aa, synthetic construct
VGALLAAAVRGRTHH

SEQ ID NO: 5118 - protein, 15 aa, synthetic construct
VPGGLRAAHRPGPAA

SEQ ID NO: 5119 - protein, 15 aa, synthetic construct
WDTCGSWVFGASVGC

SEQ ID NO: 5120 - protein, 15 aa, synthetic construct
WDTLKILQWFSHELF

SEQ ID NO: 5121 - protein, 15 aa, synthetic construct
WISTPTPASPSMCCV

SEQ ID NO: 5122 - protein, 15 aa, synthetic construct
WRSPQCAPSSPRCCA

SEQ ID NO: 5123 - protein, 15 aa, synthetic construct
WRWRPSVVARARWRP

SEQ ID NO: 5124 - protein, 15 aa, synthetic construct
AAASPAAVSPAAVSP

SEQ ID NO: 5125 - protein, 15 aa, synthetic construct
AAPLLLPGAGRAGRG

SEQ ID NO: 5126 - protein, 15 aa, synthetic construct
AAPLPRGRPAAGRRA

SEQ ID NO: 5127 - protein, 15 aa, synthetic construct
AAPSLPQPALPPRPA

SEQ ID NO: 5128 - protein, 15 aa, synthetic construct
AAPVPGGAAATHRQR

SEQ ID NO: 5129 - protein, 15 aa, synthetic construct
AAPVPPLRGSLLSWG

SEQ ID NO: 5130 - protein, 15 aa, synthetic construct
ALYFGPRRSWGSSGL

SEQ ID NO: 5131 - protein, 15 aa, synthetic construct
AMATAAAKGSRRRPR

SEQ ID NO: 5132 - protein, 15 aa, synthetic construct
ASAPPLPSPRLSPAP

SEQ ID NO: 5133 - protein, 15 aa, synthetic construct
AVHPEPGQEDAASEA

SEQ ID NO: 5134 - protein, 15 aa, synthetic construct
CPTATAPRRGARYTP

SEQ ID NO: 5135 - protein, 15 aa, synthetic construct
CRSPSPGRSRSWATG

SEQ ID NO: 5136 - protein, 15 aa, synthetic construct
GAIAQDRQPARCDRP

SEQ ID NO: 5137 - protein, 15 aa, synthetic construct
GALCPCSLWLVPGLW

SEQ ID NO: 5138 - protein, 15 aa, synthetic construct
GAQLPLPELLLLGPV

SEQ ID NO: 5139 - protein, 15 aa, synthetic construct
GDPRWRGAWRVPLPG

SEQ ID NO: 5140 - protein, 15 aa, synthetic construct
GEPPGPGPAAGRSLP

SEQ ID NO: 5141 - protein, 15 aa, synthetic construct
GGCSGGCRLATQAQG

SEQ ID NO: 5142 - protein, 15 aa, synthetic construct
GHPAAGRQDRGAVAE

SEQ ID NO: 5143 - protein, 15 aa, synthetic construct
GHPGPRRPDSRLGSR

SEQ ID NO: 5144 - protein, 15 aa, synthetic construct
GHPLREPVFRHPRSH

SEQ ID NO: 5145 - protein, 15 aa, synthetic construct
GKSQAKGRRRRPRPR

SEQ ID NO: 5146 - protein, 15 aa, synthetic construct
GPAAGGARAGRAGSA

SEQ ID NO: 5147 - protein, 15 aa, synthetic construct
GPAAPSPERRRGTEL

SEQ ID NO: 5148 - protein, 15 aa, synthetic construct
GPAEEAAPRPDFDEV

SEQ ID NO: 5149 - protein, 15 aa, synthetic construct
GPAGEVASPGQRAPL

SEQ ID NO: 5150 - protein, 15 aa, synthetic construct
GPALDSPAHPQRPPR

SEQ ID NO: 5151 - protein, 15 aa, synthetic construct
GPAPAALLRPLCGRL

SEQ ID NO: 5152 - protein, 15 aa, synthetic construct
GPAPGAPGPARRAGC

SEQ ID NO: 5153 - protein, 15 aa, synthetic construct
GPAPGARAVPGSVPV

SEQ ID NO: 5154 - protein, 15 aa, synthetic construct
GPAPIAPARSQGLAA

SEQ ID NO: 5155 - protein, 15 aa, synthetic construct
GPAPPALPAPPPWRP

SEQ ID NO: 5156 - protein, 15 aa, synthetic construct
GPAPPEPKARGPEEA

SEQ ID NO: 5157 - protein, 15 aa, synthetic construct
GPAPPQAPRSVQRAP

SEQ ID NO: 5158 - protein, 15 aa, synthetic construct
GPAPVLRAAAGPRGQ

SEQ ID NO: 5159 - protein, 15 aa, synthetic construct
GPAPVVVGGGGGGTG

SEQ ID NO: 5160 - protein, 15 aa, synthetic construct
GPARPAAPPAVRAAA

SEQ ID NO: 5161 - protein, 15 aa, synthetic construct
GPASPPASAAQRPAP

SEQ ID NO: 5162 - protein, 15 aa, synthetic construct
GPAVEPPKARRPPSA

SEQ ID NO: 5163 - protein, 15 aa, synthetic construct
GPDPAPEALQQKGQQ

SEQ ID NO: 5164 - protein, 15 aa, synthetic construct
GPDPEAQRVQPAESP

SEQ ID NO: 5165 - protein, 15 aa, synthetic construct
GPDPQDPKVRRRHRR

SEQ ID NO: 5166 - protein, 15 aa, synthetic construct
GPEPGAGGRQEASSG

SEQ ID NO: 5167 - protein, 15 aa, synthetic construct
GPEPGRRGGVRAPPP

SEQ ID NO: 5168 - protein, 15 aa, synthetic construct
GPEPLDPRAGRWREA

SEQ ID NO: 5169 - protein, 15 aa, synthetic construct
GPEPPATPAASLGPP

SEQ ID NO: 5170 - protein, 15 aa, synthetic construct
GPEPPQHRVRCQAAD

SEQ ID NO: 5171 - protein, 15 aa, synthetic construct
GPIPREEPERTLARG

SEQ ID NO: 5172 - protein, 15 aa, synthetic construct
GPLEPQPLGAAAAAA

SEQ ID NO: 5173 - protein, 15 aa, synthetic construct
GPLPDGAAAGRGAGC

SEQ ID NO: 5174 - protein, 15 aa, synthetic construct
GPLPGHSARGPSAPR

SEQ ID NO: 5175 - protein, 15 aa, synthetic construct
GPLPPPPPAAAAAAT

SEQ ID NO: 5176 - protein, 15 aa, synthetic construct
GPPDGERGAPAAAAA

SEQ ID NO: 5177 - protein, 15 aa, synthetic construct
GPPGAAACGKFQVVA

SEQ ID NO: 5178 - protein, 15 aa, synthetic construct
GPPLGAAANAARAPQ

SEQ ID NO: 5179 - protein, 15 aa, synthetic construct
GPPLSRSPWRAQALA

SEQ ID NO: 5180 - protein, 15 aa, synthetic construct
GPPVPSTGSPSDDQL

SEQ ID NO: 5181 - protein, 15 aa, synthetic construct
GPQPVAAWPPGGTWS

SEQ ID NO: 5182 - protein, 15 aa, synthetic construct
GPVARTSSASASAST

SEQ ID NO: 5183 - protein, 15 aa, synthetic construct
GPVCVHSSSPIPYST

SEQ ID NO: 5184 - protein, 15 aa, synthetic construct
GPVGRPRRPPLGLPH

SEQ ID NO: 5185 - protein, 15 aa, synthetic construct
GPVLAAASGDGSAPR

SEQ ID NO: 5186 - protein, 15 aa, synthetic construct
GPVLHPGPHRGGRPR

SEQ ID NO: 5187 - protein, 15 aa, synthetic construct
GPVLQVRPHPRDRAQ

SEQ ID NO: 5188 - protein, 15 aa, synthetic construct
GPVLRQCADPVLRLP

SEQ ID NO: 5189 - protein, 15 aa, synthetic construct
GPVPGAAALGVVQPV

SEQ ID NO: 5190 - protein, 15 aa, synthetic construct
GPVQPWRRGCPPIRN

SEQ ID NO: 5191 - protein, 15 aa, synthetic construct
GPVRDTGGRRPGAVP

SEQ ID NO: 5192 - protein, 15 aa, synthetic construct
GPVRRGGSARAQDGG

SEQ ID NO: 5193 - protein, 15 aa, synthetic construct
GPVRRPQPHHVRGLR

SEQ ID NO: 5194 - protein, 15 aa, synthetic construct
GPVRSGAAELRLGGR

SEQ ID NO: 5195 - protein, 15 aa, synthetic construct
GPVRTDPRSALSEPG

SEQ ID NO: 5196 - protein, 15 aa, synthetic construct
GPVSEVAVSPAPRFT

SEQ ID NO: 5197 - protein, 15 aa, synthetic construct
GPVSEYPAAPAGHPS

SEQ ID NO: 5198 - protein, 15 aa, synthetic construct
GPVTAGGAAAPPPAL

SEQ ID NO: 5199 - protein, 15 aa, synthetic construct
GPVVAAAAVAARGHR

SEQ ID NO: 5200 - protein, 15 aa, synthetic construct
GRAAAEPAGFPARRP

SEQ ID NO: 5201 - protein, 15 aa, synthetic construct
GRAADPVQAAHVLPH

SEQ ID NO: 5202 - protein, 15 aa, synthetic construct
GRAAPGAQKRVPGAR

SEQ ID NO: 5203 - protein, 15 aa, synthetic construct
GRAAPQDHQGNPAFA

SEQ ID NO: 5204 - protein, 15 aa, synthetic construct
GRAAPQLLLGASGPA

SEQ ID NO: 5205 - protein, 15 aa, synthetic construct
GRAATPAGPVPGGLP

SEQ ID NO: 5206 - protein, 15 aa, synthetic construct
GRAGAASHGPHPLAC

SEQ ID NO: 5207 - protein, 15 aa, synthetic construct
GRAGLPGLHREALPE

SEQ ID NO: 5208 - protein, 15 aa, synthetic construct
GRAPARPAAPAGHPG

SEQ ID NO: 5209 - protein, 15 aa, synthetic construct
GRAPGGCPAAAAPAS

SEQ ID NO: 5210 - protein, 15 aa, synthetic construct
GRAPRTALASGPDVV

SEQ ID NO: 5211 - protein, 15 aa, synthetic construct
GRAPRVRLLDPGLAR

SEQ ID NO: 5212 - protein, 15 aa, synthetic construct
GRAQAGGMGPGRGQP

SEQ ID NO: 5213 - protein, 15 aa, synthetic construct
GRARGQRAAGSVRGT

SEQ ID NO: 5214 - protein, 15 aa, synthetic construct
GRATRRCSAIPAGAP

SEQ ID NO: 5215 - protein, 15 aa, synthetic construct
GRAVPPGRGAVVLHL

SEQ ID NO: 5216 - protein, 15 aa, synthetic construct
GRCARQRPTETGRDA

SEQ ID NO: 5217 - protein, 15 aa, synthetic construct
GRCEPGGAESRGAGL

SEQ ID NO: 5218 - protein, 15 aa, synthetic construct
GREAAHTGLRSPAAP

SEQ ID NO: 5219 - protein, 15 aa, synthetic construct
GREADPVRGASGAGR

SEQ ID NO: 5220 - protein, 15 aa, synthetic construct
GREGSIPGNPAAAVV

SEQ ID NO: 5221 - protein, 15 aa, synthetic construct
GREPPPAVPGDSLRR

SEQ ID NO: 5222 - protein, 15 aa, synthetic construct
GREPRLDASPRATRR

SEQ ID NO: 5223 - protein, 15 aa, synthetic construct
GRGAPGRACPGSAVQ

SEQ ID NO: 5224 - protein, 15 aa, synthetic construct
GRGASGGGDRPGLRA

SEQ ID NO: 5225 - protein, 15 aa, synthetic construct
GRGKCNIADRVCSHR

SEQ ID NO: 5226 - protein, 15 aa, synthetic construct
GRGLLPAQGREEALG

SEQ ID NO: 5227 - protein, 15 aa, synthetic construct
GRGPPAPPRPGSPAR

SEQ ID NO: 5228 - protein, 15 aa, synthetic construct
GRGQLRGALVGEPPA

SEQ ID NO: 5229 - protein, 15 aa, synthetic construct
GRGSSCNSGTPRATS

SEQ ID NO: 5230 - protein, 15 aa, synthetic construct
GRIPLERGPRRGSRT

SEQ ID NO: 5231 - protein, 15 aa, synthetic construct
GRLEGLHQCSAAGPA

SEQ ID NO: 5232 - protein, 15 aa, synthetic construct
GRLGAAPTGQAGGRW

SEQ ID NO: 5233 - protein, 15 aa, synthetic construct
GRLNAERCGAEILFR

SEQ ID NO: 5234 - protein, 15 aa, synthetic construct
GRLPAAAPALLLRRP

SEQ ID NO: 5235 - protein, 15 aa, synthetic construct
GRLPAKPPGRARAAA

SEQ ID NO: 5236 - protein, 15 aa, synthetic construct
GRNARPDPSPSSSSP

SEQ ID NO: 5237 - protein, 15 aa, synthetic construct
GRPAAGCFSGFGLGA

SEQ ID NO: 5238 - protein, 15 aa, synthetic construct
GRPAARRAGLHPGLR

SEQ ID NO: 5239 - protein, 15 aa, synthetic construct
GRPAEICELFPYGDP

SEQ ID NO: 5240 - protein, 15 aa, synthetic construct
GRPAGLGAALPRAPA

SEQ ID NO: 5241 - protein, 15 aa, synthetic construct
GRPAKTHQPAQEPAG

SEQ ID NO: 5242 - protein, 15 aa, synthetic construct
GRPALRRRRSRRRVP

SEQ ID NO: 5243 - protein, 15 aa, synthetic construct
GRPAPQVWSVPARGL

SEQ ID NO: 5244 - protein, 15 aa, synthetic construct
GRPAQGAQLRPHQGR

SEQ ID NO: 5245 - protein, 15 aa, synthetic construct
GRPARAWARAMTAQG

SEQ ID NO: 5246 - protein, 15 aa, synthetic construct
GRPARPVASAPGHSP

SEQ ID NO: 5247 - protein, 15 aa, synthetic construct
GRPDCTGRDPEPGQG

SEQ ID NO: 5248 - protein, 15 aa, synthetic construct
GRPDDHSNQPSVPWC

SEQ ID NO: 5249 - protein, 15 aa, synthetic construct
GRPDLICGPPPALGP

SEQ ID NO: 5250 - protein, 15 aa, synthetic construct
GRPEAARGALPGAKE

SEQ ID NO: 5251 - protein, 15 aa, synthetic construct
GRPEQDPAGGVRTAR

SEQ ID NO: 5252 - protein, 15 aa, synthetic construct
GRPGAAGLGAARCGA

SEQ ID NO: 5253 - protein, 15 aa, synthetic construct
GRPGAARQAVLQRGL

SEQ ID NO: 5254 - protein, 15 aa, synthetic construct
GRPGAGPGCTAPTPA

SEQ ID NO: 5255 - protein, 15 aa, synthetic construct
GRPGCAEGRREAPRA

SEQ ID NO: 5256 - protein, 15 aa, synthetic construct
GRPGGAQPRPAAFPM

SEQ ID NO: 5257 - protein, 15 aa, synthetic construct
GRPGGGAAGTGCGRP

SEQ ID NO: 5258 - protein, 15 aa, synthetic construct
GRPGHHHPGDQPQGG

SEQ ID NO: 5259 - protein, 15 aa, synthetic construct
GRPGLGCFPRQRLAG

SEQ ID NO: 5260 - protein, 15 aa, synthetic construct
GRPGPHLPAAPARLG

SEQ ID NO: 5261 - protein, 15 aa, synthetic construct
GRPGRARLPGGAVGP

SEQ ID NO: 5262 - protein, 15 aa, synthetic construct
GRPGRRLRCWAGAGA

SEQ ID NO: 5263 - protein, 15 aa, synthetic construct
GRPGRRRCPGRQAEE

SEQ ID NO: 5264 - protein, 15 aa, synthetic construct
GRPGVLGPPCWTSPA

SEQ ID NO: 5265 - protein, 15 aa, synthetic construct
GRPGVLRPRPRSPRR

SEQ ID NO: 5266 - protein, 15 aa, synthetic construct
GRPGVSNLGGDPGHQ

SEQ ID NO: 5267 - protein, 15 aa, synthetic construct
GRPHAAAERAREPQA

SEQ ID NO: 5268 - protein, 15 aa, synthetic construct
GRPHGPGGRQLALGI

SEQ ID NO: 5269 - protein, 15 aa, synthetic construct
GRPLCVRQQRAGVRQ

SEQ ID NO: 5270 - protein, 15 aa, synthetic construct
GRPLLALRAAGAALR

SEQ ID NO: 5271 - protein, 15 aa, synthetic construct
GRPPRGLRQACCWSA

SEQ ID NO: 5272 - protein, 15 aa, synthetic construct
GRPQAGGQLWAWSRQ

SEQ ID NO: 5273 - protein, 15 aa, synthetic construct
GRPQLPGGGETQDPG

SEQ ID NO: 5274 - protein, 15 aa, synthetic construct
GRPQRPPDRWEDRPG

SEQ ID NO: 5275 - protein, 15 aa, synthetic construct
GRPRAAERGPRRRRG

SEQ ID NO: 5276 - protein, 15 aa, synthetic construct
GRPRGDGRVWQQRGQ

SEQ ID NO: 5277 - protein, 15 aa, synthetic construct
GRPRGQRRGRARRHP

SEQ ID NO: 5278 - protein, 15 aa, synthetic construct
GRPRGRHRPRSLCTI

SEQ ID NO: 5279 - protein, 15 aa, synthetic construct
GRPRLHHLPGAAGLA

SEQ ID NO: 5280 - protein, 15 aa, synthetic construct
GRPRLRLHLGGGRGG

SEQ ID NO: 5281 - protein, 15 aa, synthetic construct
GRPRRPPPAWARLRP

SEQ ID NO: 5282 - protein, 15 aa, synthetic construct
GRPRSLSPARRGGQI

SEQ ID NO: 5283 - protein, 15 aa, synthetic construct
GRPSEPEAEGAPGGA

SEQ ID NO: 5284 - protein, 15 aa, synthetic construct
GRPSQEKEDELLRAG

SEQ ID NO: 5285 - protein, 15 aa, synthetic construct
GRPTGGAPHLPPAGP

SEQ ID NO: 5286 - protein, 15 aa, synthetic construct
GRVAGVAGSGRQGGR

SEQ ID NO: 5287 - protein, 15 aa, synthetic construct
GRVAVPAASPSQRPE

SEQ ID NO: 5288 - protein, 15 aa, synthetic construct
GRVGAVPARHTAGQE

SEQ ID NO: 5289 - protein, 15 aa, synthetic construct
GRVPAELPGRGARER

SEQ ID NO: 5290 - protein, 15 aa, synthetic construct
GRVPAHARSLEGEVS

SEQ ID NO: 5291 - protein, 15 aa, synthetic construct
GRVPDTRGGSHRPPG

SEQ ID NO: 5292 - protein, 15 aa, synthetic construct
GRVPGGSGYGGAGPA

SEQ ID NO: 5293 - protein, 15 aa, synthetic construct
GRVPGRTQVPSRACS

SEQ ID NO: 5294 - protein, 15 aa, synthetic construct
GRVPLRAHPAAGAGH

SEQ ID NO: 5295 - protein, 15 aa, synthetic construct
GRVPPHPQCTLRRGG

SEQ ID NO: 5296 - protein, 15 aa, synthetic construct
GRVPVAAATALAGSR

SEQ ID NO: 5297 - protein, 15 aa, synthetic construct
GRVREPQGAVRIQSR

SEQ ID NO: 5298 - protein, 15 aa, synthetic construct
GSPHPQSRSRVAASA

SEQ ID NO: 5299 - protein, 15 aa, synthetic construct
GSPLWTRVPCPGLAM

SEQ ID NO: 5300 - protein, 15 aa, synthetic construct
GTPHCFPLPSPRLGS

SEQ ID NO: 5301 - protein, 15 aa, synthetic construct
GVALPERGHRPTLSR

SEQ ID NO: 5302 - protein, 15 aa, synthetic construct
GVAVPQDGQGPAGLV

SEQ ID NO: 5303 - protein, 15 aa, synthetic construct
GVPLGPSLGSVLQSG

SEQ ID NO: 5304 - protein, 15 aa, synthetic construct
GVPVQRALVRVRGAL

SEQ ID NO: 5305 - protein, 15 aa, synthetic construct
GVRILEGLSDPKLPC

SEQ ID NO: 5306 - protein, 15 aa, synthetic construct
GVSVPSVAAVFFGGR

SEQ ID NO: 5307 - protein, 15 aa, synthetic construct
GVSVPTQPGSLGSAA

SEQ ID NO: 5308 - protein, 15 aa, synthetic construct
HALPHHPQPHQRHAQ

SEQ ID NO: 5309 - protein, 15 aa, synthetic construct
HAPRLPPPALLHPRP

SEQ ID NO: 5310 - protein, 15 aa, synthetic construct
HPLPRTRSPRGSSPA

SEQ ID NO: 5311 - protein, 15 aa, synthetic construct
HRPRPERRGRRPTSG

SEQ ID NO: 5312 - protein, 15 aa, synthetic construct
IPAPSTPTPSRFSSG

SEQ ID NO: 5313 - protein, 15 aa, synthetic construct
LDPGQQRRHGLGGHL

SEQ ID NO: 5314 - protein, 15 aa, synthetic construct
LGRPACSRSRRALGA

SEQ ID NO: 5315 - protein, 15 aa, synthetic construct
LPMPRGLPGGRRAAS

SEQ ID NO: 5316 - protein, 15 aa, synthetic construct
LRRDAGAGGGGHGAG

SEQ ID NO: 5317 - protein, 15 aa, synthetic construct
PAAARTRRRGRRAPP

SEQ ID NO: 5318 - protein, 15 aa, synthetic construct
PLVGARRRGPAPRAR

SEQ ID NO: 5319 - protein, 15 aa, synthetic construct
PPRAGASLPRAPGIP

SEQ ID NO: 5320 - protein, 15 aa, synthetic construct
PRASAARRAAPARSP

SEQ ID NO: 5321 - protein, 15 aa, synthetic construct
PSLRPGRRRRRHRRC

SEQ ID NO: 5322 - protein, 15 aa, synthetic construct
PYWMSPRAKASRRRP

SEQ ID NO: 5323 - protein, 15 aa, synthetic construct
QRRPEPRRASRRRSG

SEQ ID NO: 5324 - protein, 15 aa, synthetic construct
RAAPRAARPRQVPGP

SEQ ID NO: 5325 - protein, 15 aa, synthetic construct
RAGPRGAPTAAGSGP

SEQ ID NO: 5326 - protein, 15 aa, synthetic construct
RAPARDRVPLAGHRR

SEQ ID NO: 5327 - protein, 15 aa, synthetic construct
RAPARRRRGRAGAPR

SEQ ID NO: 5328 - protein, 15 aa, synthetic construct
RAPGLGLPPAAARTR

SEQ ID NO: 5329 - protein, 15 aa, synthetic construct
RAPMRAARARGAAAG

SEQ ID NO: 5330 - protein, 15 aa, synthetic construct
RAPPLPRAAAASCSP

SEQ ID NO: 5331 - protein, 15 aa, synthetic construct
RAPQPKRTRAPRTRC

SEQ ID NO: 5332 - protein, 15 aa, synthetic construct
RAPRLPAALRPRPAA

SEQ ID NO: 5333 - protein, 15 aa, synthetic construct
RARPKDREAVARPES

SEQ ID NO: 5334 - protein, 15 aa, synthetic construct
RGRRSQPSAARSRRR

SEQ ID NO: 5335 - protein, 15 aa, synthetic construct
RPAVAGGPGGGATSR

SEQ ID NO: 5336 - protein, 15 aa, synthetic construct
RPKSPPRSQSPRASL

SEQ ID NO: 5337 - protein, 15 aa, synthetic construct
RPRKAPSPPRRQPRR

SEQ ID NO: 5338 - protein, 15 aa, synthetic construct
RPRPGASRLPAALQA

SEQ ID NO: 5339 - protein, 15 aa, synthetic construct
RRGADPAEGRSRPGA

SEQ ID NO: 5340 - protein, 15 aa, synthetic construct
RRGGLGGRRRAMAAG

SEQ ID NO: 5341 - protein, 15 aa, synthetic construct
RRPRRAASRLVLALL

SEQ ID NO: 5342 - protein, 15 aa, synthetic construct
RSPALRARGGTTIGE

SEQ ID NO: 5343 - protein, 15 aa, synthetic construct
RSPSLARPPPPWFRV

SEQ ID NO: 5344 - protein, 15 aa, synthetic construct
SAPVLLRLRRPQVLL

SEQ ID NO: 5345 - protein, 15 aa, synthetic construct
SAPWRHPRLLPGWPR

SEQ ID NO: 5346 - protein, 15 aa, synthetic construct
SEVELPAVQPSILPP

SEQ ID NO: 5347 - protein, 15 aa, synthetic construct
SPRLHPRLPRRGKRA

SEQ ID NO: 5348 - protein, 15 aa, synthetic construct
SPRPALGRSRAGPAA

SEQ ID NO: 5349 - protein, 15 aa, synthetic construct
SRGTTSPGPVPGKCR

SEQ ID NO: 5350 - protein, 15 aa, synthetic construct
STIRRPSSSAASGSR

SEQ ID NO: 5351 - protein, 15 aa, synthetic construct
WAPMKSSPGRRWARC

SEQ ID NO: 5352 - protein, 15 aa, synthetic construct
WATPPPPRRAASRRA

SEQ ID NO: 5353 - protein, 15 aa, synthetic construct
WGCVFLVPGSPRLPR

SEQ ID NO: 5354 - protein, 15 aa, synthetic construct
WGRCLARRRRPGSRA

SEQ ID NO: 5355 - protein, 15 aa, synthetic construct
WPASSRGTTASRPRR

SEQ ID NO: 5356 - protein, 15 aa, synthetic construct
WQNRSPRPAASRTRP

SEQ ID NO: 5357 - protein, 15 aa, synthetic construct
WRKFIDVSMLGLKEK

SEQ ID NO: 5358 - protein, 15 aa, synthetic construct
WSGGEKRRRRRPRRL

SEQ ID NO: 5359 - protein, 15 aa, synthetic construct
CSTPPSRASPSCRPA

SEQ ID NO: 5360 - protein, 15 aa, synthetic construct
EAPLRGDDLRERHGR

SEQ ID NO: 5361 - protein, 15 aa, synthetic construct
EAPQQGGGAALARAG

SEQ ID NO: 5362 - protein, 15 aa, synthetic construct
EDQAGELADHPGRRR

SEQ ID NO: 5363 - protein, 15 aa, synthetic construct
EDQEPAPTAPGPGAG

SEQ ID NO: 5364 - protein, 15 aa, synthetic construct
EPQCPQLPHGLALRG

SEQ ID NO: 5365 - protein, 15 aa, synthetic construct
ERSWADAKSGEREGR

SEQ ID NO: 5366 - protein, 15 aa, synthetic construct
ESRHCWAACSRCCSG

SEQ ID NO: 5367 - protein, 15 aa, synthetic construct
EYLAQEELARPEQGQ

SEQ ID NO: 5368 - protein, 15 aa, synthetic construct
GDLREDLGDREGDRS

SEQ ID NO: 5369 - protein, 15 aa, synthetic construct
GDRAHLRARAGSRAG

SEQ ID NO: 5370 - protein, 15 aa, synthetic construct
GEGRRPRPGAGPLAA

SEQ ID NO: 5371 - protein, 15 aa, synthetic construct
GERTSSAWGGTTRTT

SEQ ID NO: 5372 - protein, 15 aa, synthetic construct
GLEAPESSGDPVAAA

SEQ ID NO: 5373 - protein, 15 aa, synthetic construct
GPDSLGLTVPAETQL

SEQ ID NO: 5374 - protein, 15 aa, synthetic construct
GPRNSLRCACVPSPS

SEQ ID NO: 5375 - protein, 15 aa, synthetic construct
KGTAQDPGRRGEPGL

SEQ ID NO: 5376 - protein, 15 aa, synthetic construct
KQDRGVQLQQDLVGQ

SEQ ID NO: 5377 - protein, 15 aa, synthetic construct
PLCPEATGAGALGPA

SEQ ID NO: 5378 - protein, 15 aa, synthetic construct
PLDPPLDAEPGPGLH

SEQ ID NO: 5379 - protein, 15 aa, synthetic construct
PLQVARPRPRASPRG

SEQ ID NO: 5380 - protein, 15 aa, synthetic construct
RGLPRRGDPRPEQLL

SEQ ID NO: 5381 - protein, 15 aa, synthetic construct
RLPSSAGAAGARQVP

SEQ ID NO: 5382 - protein, 15 aa, synthetic construct
RRAPPRAALGASAAG

SEQ ID NO: 5383 - protein, 15 aa, synthetic construct
RRPPPRGGLGASAEH

SEQ ID NO: 5384 - protein, 15 aa, synthetic construct
RRRPPRAGLRPAGTE

SEQ ID NO: 5385 - protein, 15 aa, synthetic construct
SACSRSGWNGRTGGG

SEQ ID NO: 5386 - protein, 15 aa, synthetic construct
SSDELSVRPPRAAQP

SEQ ID NO: 5387 - protein, 15 aa, synthetic construct
WQERPSPSPPPCCAL

SEQ ID NO: 5388 - protein, 15 aa, synthetic construct
WRQPPSRARMSRPRK

SEQ ID NO: 5389 - protein, 15 aa, synthetic construct
WRRAGTSRCSVSSLT

SEQ ID NO: 5390 - protein, 15 aa, synthetic construct
WRRRPGKMAPAVKSE

SEQ ID NO: 5391 - protein, 15 aa, synthetic construct
WRSPRPRRASTSRPS

SEQ ID NO: 5392 - protein, 15 aa, synthetic construct
AAIRDFQARDFDFWL

SEQ ID NO: 5393 - protein, 15 aa, synthetic construct
AALPPGARTERARRG

SEQ ID NO: 5394 - protein, 15 aa, synthetic construct
ADQPGEYSVFLRLRY

SEQ ID NO: 5395 - protein, 15 aa, synthetic construct
AGAGGGAPGARRRRR

SEQ ID NO: 5396 - protein, 15 aa, synthetic construct
AGALPGRARRGTAAI

SEQ ID NO: 5397 - protein, 15 aa, synthetic construct
AGFPSREDPEGEAAR

SEQ ID NO: 5398 - protein, 15 aa, synthetic construct
AGLPDLSACRGEGAD

SEQ ID NO: 5399 - protein, 15 aa, synthetic construct
AGLPRPPAGRGQFGE

SEQ ID NO: 5400 - protein, 15 aa, synthetic construct
AGPLPGPAAGRRRGR

SEQ ID NO: 5401 - protein, 15 aa, synthetic construct
AGPPAAAPAAASPSA

SEQ ID NO: 5402 - protein, 15 aa, synthetic construct
AGPVPWRAPADGADR

SEQ ID NO: 5403 - protein, 15 aa, synthetic construct
ALGGDRRRPCARAGL

SEQ ID NO: 5404 - protein, 15 aa, synthetic construct
ALLRAADAAAESRGG

SEQ ID NO: 5405 - protein, 15 aa, synthetic construct
APAGDYGDSLRGVRA

SEQ ID NO: 5406 - protein, 15 aa, synthetic construct
ASRVPQPRPPADPCP

SEQ ID NO: 5407 - protein, 15 aa, synthetic construct
CAILTRLLLLISSNV

SEQ ID NO: 5408 - protein, 15 aa, synthetic construct
CAPWGCSSRPSSPTT

SEQ ID NO: 5409 - protein, 15 aa, synthetic construct
CTDCSARATTLSGSV

SEQ ID NO: 5410 - protein, 15 aa, synthetic construct
EAGPAGPLPVSWVVP

SEQ ID NO: 5411 - protein, 15 aa, synthetic construct
EAPRARMAGLGGAVD

SEQ ID NO: 5412 - protein, 15 aa, synthetic construct
FDQELLPSCDFHFPF

SEQ ID NO: 5413 - protein, 15 aa, synthetic construct
GALLPRFAVPGARAA

SEQ ID NO: 5414 - protein, 15 aa, synthetic construct
GGALAAPDPRGSRGQ

SEQ ID NO: 5415 - protein, 15 aa, synthetic construct
GGALPCAQGRLGRRL

SEQ ID NO: 5416 - protein, 15 aa, synthetic construct
GGAPGASERTAPALL

SEQ ID NO: 5417 - protein, 15 aa, synthetic construct
GGAPGTERRSRAAPE

SEQ ID NO: 5418 - protein, 15 aa, synthetic construct
GGAVPAEGGVQHPPG

SEQ ID NO: 5419 - protein, 15 aa, synthetic construct
GGEPHPGADSAHRAL

SEQ ID NO: 5420 - protein, 15 aa, synthetic construct
GGGGGRPSAGSPATA

SEQ ID NO: 5421 - protein, 15 aa, synthetic construct
GGGLPVRAARLPRLP

SEQ ID NO: 5422 - protein, 15 aa, synthetic construct
GGHLPGRTHQEARGG

SEQ ID NO: 5423 - protein, 15 aa, synthetic construct
GGKPIPETHDSDAGE

SEQ ID NO: 5424 - protein, 15 aa, synthetic construct
GGLGQSPVQGAAGRV

SEQ ID NO: 5425 - protein, 15 aa, synthetic construct
GGLGRRGVHMLAQPP

SEQ ID NO: 5426 - protein, 15 aa, synthetic construct
GGLHGGGVVSDVGAQ

SEQ ID NO: 5427 - protein, 15 aa, synthetic construct
GGLHVRRVLLLRGRG

SEQ ID NO: 5428 - protein, 15 aa, synthetic construct
GGLPAVAALRFLRQG

SEQ ID NO: 5429 - protein, 15 aa, synthetic construct
GGLPAVAVRAVRVLP

SEQ ID NO: 5430 - protein, 15 aa, synthetic construct
GGLPDQRRHRLRARG

SEQ ID NO: 5431 - protein, 15 aa, synthetic construct
GGLPRGEPVVPVRPQ

SEQ ID NO: 5432 - protein, 15 aa, synthetic construct
GGLRAAAAELGPAGG

SEQ ID NO: 5433 - protein, 15 aa, synthetic construct
GGLRDLELRTPAPEA

SEQ ID NO: 5434 - protein, 15 aa, synthetic construct
GGLSAVLCGGGTQRP

SEQ ID NO: 5435 - protein, 15 aa, synthetic construct
GGLVPLQSGRVHFRA

SEQ ID NO: 5436 - protein, 15 aa, synthetic construct
GGMHGEASAAAPGAR

SEQ ID NO: 5437 - protein, 15 aa, synthetic construct
GGNLCEVCVPENQQN

SEQ ID NO: 5438 - protein, 15 aa, synthetic construct
GGPAGAGRRHRVPLP

SEQ ID NO: 5439 - protein, 15 aa, synthetic construct
GGPERGGPPLLRHPR

SEQ ID NO: 5440 - protein, 15 aa, synthetic construct
GGPGPARGRRAPGPG

SEQ ID NO: 5441 - protein, 15 aa, synthetic construct
GGPGPGLRRSRVAGR

SEQ ID NO: 5442 - protein, 15 aa, synthetic construct
GGPGSRMQGQPPDPA

SEQ ID NO: 5443 - protein, 15 aa, synthetic construct
GGPGWLCIQGGQRGQ

SEQ ID NO: 5444 - protein, 15 aa, synthetic construct
GGPLGTQLLGRRLGT

SEQ ID NO: 5445 - protein, 15 aa, synthetic construct
GGPLLRRRRRRRQRR

SEQ ID NO: 5446 - protein, 15 aa, synthetic construct
GGPPRAHTVLGEGRD

SEQ ID NO: 5447 - protein, 15 aa, synthetic construct
GGPRPSPLPDTKASS

SEQ ID NO: 5448 - protein, 15 aa, synthetic construct
GGPSPAEHSRAEESA

SEQ ID NO: 5449 - protein, 15 aa, synthetic construct
GGPVCSVRCRNPALH

SEQ ID NO: 5450 - protein, 15 aa, synthetic construct
GGPVDELRGAEHRPD

SEQ ID NO: 5451 - protein, 15 aa, synthetic construct
GGRLPRGQEGGAVVV

SEQ ID NO: 5452 - protein, 15 aa, synthetic construct
GGTLNSRCLPWNPGR

SEQ ID NO: 5453 - protein, 15 aa, synthetic construct
GGTPPGKGFSRGVSL

SEQ ID NO: 5454 - protein, 15 aa, synthetic construct
GGVASLSASSPPSST

SEQ ID NO: 5455 - protein, 15 aa, synthetic construct
GGVLPGGRAAGAAGR

SEQ ID NO: 5456 - protein, 15 aa, synthetic construct
GILGFLPPLSEPACT

SEQ ID NO: 5457 - protein, 15 aa, synthetic construct
GIPLPPRPLFLPLLV

SEQ ID NO: 5458 - protein, 15 aa, synthetic construct
GKIQKFPHRRPAGGG

SEQ ID NO: 5459 - protein, 15 aa, synthetic construct
GLLAGPAAAPAAIPP

SEQ ID NO: 5460 - protein, 15 aa, synthetic construct
GLLPALSAQLRLPAS

SEQ ID NO: 5461 - protein, 15 aa, synthetic construct
GQLPHGGAQRGAGGF

SEQ ID NO: 5462 - protein, 15 aa, synthetic construct
GSLPAAAVRPGPGRP

SEQ ID NO: 5463 - protein, 15 aa, synthetic construct
GSLPLWLPHPAAALL

SEQ ID NO: 5464 - protein, 15 aa, synthetic construct
GSPPPTEGSGLRSAL

SEQ ID NO: 5465 - protein, 15 aa, synthetic construct
GSPRKRGPQHRQTSS

SEQ ID NO: 5466 - protein, 15 aa, synthetic construct
GSRAGRRRRTPRSSP

SEQ ID NO: 5467 - protein, 15 aa, synthetic construct
GSRGGRRPGGKGARH

SEQ ID NO: 5468 - protein, 15 aa, synthetic construct
GSRLPARPRGLRSGA

SEQ ID NO: 5469 - protein, 15 aa, synthetic construct
GSVLPAAGTAPGQAG

SEQ ID NO: 5470 - protein, 15 aa, synthetic construct
HHWPTDVDPSTVLTI

SEQ ID NO: 5471 - protein, 15 aa, synthetic construct
IPLPALLRRGHRLPG

SEQ ID NO: 5472 - protein, 15 aa, synthetic construct
LHAGVWPDGHRLAGQ

SEQ ID NO: 5473 - protein, 15 aa, synthetic construct
LPGRGGQGGGAAPGR

SEQ ID NO: 5474 - protein, 15 aa, synthetic construct
LRAGQPSPGRGAGGR

SEQ ID NO: 5475 - protein, 15 aa, synthetic construct
LRRPPRWPQWPEAPA

SEQ ID NO: 5476 - protein, 15 aa, synthetic construct
PALPRPLHLPERGAH

SEQ ID NO: 5477 - protein, 15 aa, synthetic construct
PATSGSRPEPPAGRG

SEQ ID NO: 5478 - protein, 15 aa, synthetic construct
PGLPEPVRGQPWGGA

SEQ ID NO: 5479 - protein, 15 aa, synthetic construct
PPLAAEPTALAHVPL

SEQ ID NO: 5480 - protein, 15 aa, synthetic construct
PPLPLPLPAPGSPVS

SEQ ID NO: 5481 - protein, 15 aa, synthetic construct
PPLPLRGRAGGRVPV

SEQ ID NO: 5482 - protein, 15 aa, synthetic construct
PPRPRPRAAPPAPRP

SEQ ID NO: 5483 - protein, 15 aa, synthetic construct
PPVPPGCLPRHLPGC

SEQ ID NO: 5484 - protein, 15 aa, synthetic construct
PRSSTTSVSASMASR

SEQ ID NO: 5485 - protein, 15 aa, synthetic construct
PSTATARASGRTASA

SEQ ID NO: 5486 - protein, 15 aa, synthetic construct
QAGGRPGGALPPAQP

SEQ ID NO: 5487 - protein, 15 aa, synthetic construct
RATAAAPRPVLAPLC

SEQ ID NO: 5488 - protein, 15 aa, synthetic construct
RCTAAAPRARAAAPR

SEQ ID NO: 5489 - protein, 15 aa, synthetic construct
RRRRPLPCDAGAAGA

SEQ ID NO: 5490 - protein, 15 aa, synthetic construct
RTSAPRLGPPPSPPR

SEQ ID NO: 5491 - protein, 15 aa, synthetic construct
SARPGNRCAPTAATA

SEQ ID NO: 5492 - protein, 15 aa, synthetic construct
TAARSTPSPRASAAC

SEQ ID NO: 5493 - protein, 15 aa, synthetic construct
VAPRRPVQHRGHVFP

SEQ ID NO: 5494 - protein, 15 aa, synthetic construct
WAPRAGSRWAASSPW

SEQ ID NO: 5495 - protein, 15 aa, synthetic construct
WRSLRAPPRPPAPCA

SEQ ID NO: 5496 - protein, 15 aa, synthetic construct
AAARSARSTEPRASA

SEQ ID NO: 5497 - protein, 15 aa, synthetic construct
ADQPGAARATEPLPG

SEQ ID NO: 5498 - protein, 15 aa, synthetic construct
ECWPEEAGPALGPGS

SEQ ID NO: 5499 - protein, 15 aa, synthetic construct
ELGTRAPNTPDTLKH

SEQ ID NO: 5500 - protein, 15 aa, synthetic construct
ELHERPASLGAPSSG

SEQ ID NO: 5501 - protein, 15 aa, synthetic construct
ELVQECGGLGLRGGE

SEQ ID NO: 5502 - protein, 15 aa, synthetic construct
ENGSAECRPGIYASS

SEQ ID NO: 5503 - protein, 15 aa, synthetic construct
ENKRRPLPHPGTLLV

SEQ ID NO: 5504 - protein, 15 aa, synthetic construct
ENQILHRGRGGALAA

SEQ ID NO: 5505 - protein, 15 aa, synthetic construct
ENSWKIAHPVVLAWT

SEQ ID NO: 5506 - protein, 15 aa, synthetic construct
ENYNSSWIPGSHIVS

SEQ ID NO: 5507 - protein, 15 aa, synthetic construct
ENYQRQTRRQRRGGG

SEQ ID NO: 5508 - protein, 15 aa, synthetic construct
EPPIHLQVGSCCQGG

SEQ ID NO: 5509 - protein, 15 aa, synthetic construct
EPRWRMLYLCTSHPG

SEQ ID NO: 5510 - protein, 15 aa, synthetic construct
ERAAGRPVGELVLHR

SEQ ID NO: 5511 - protein, 15 aa, synthetic construct
ERAGAGARALDGGRA

SEQ ID NO: 5512 - protein, 15 aa, synthetic construct
ERAGAGGQRHGLPPV

SEQ ID NO: 5513 - protein, 15 aa, synthetic construct
ERDGGAHLRLLHHHR

SEQ ID NO: 5514 - protein, 15 aa, synthetic construct
ESASDRLPARLGGGQ

SEQ ID NO: 5515 - protein, 15 aa, synthetic construct
GGGHHTAPRPAPGAA

SEQ ID NO: 5516 - protein, 15 aa, synthetic construct
GLPPAPAVPAPRAGV

SEQ ID NO: 5517 - protein, 15 aa, synthetic construct
GLPPSLISENFCRGF

SEQ ID NO: 5518 - protein, 15 aa, synthetic construct
GPPPPPLPCGAAPGW

SEQ ID NO: 5519 - protein, 15 aa, synthetic construct
GRQPSCTAQQWPSSW

SEQ ID NO: 5520 - protein, 15 aa, synthetic construct
LRGSRRGGRGQRRRA

SEQ ID NO: 5521 - protein, 15 aa, synthetic construct
PGCGRCRPPQPLRRR

SEQ ID NO: 5522 - protein, 15 aa, synthetic construct
QGRSPAPVRILGHPR

SEQ ID NO: 5523 - protein, 15 aa, synthetic construct
RASHPRPECGPHARG

SEQ ID NO: 5524 - protein, 15 aa, synthetic construct
RPVSTSVMIWFLRQD

SEQ ID NO: 5525 - protein, 15 aa, synthetic construct
TGTGRPFCPISAMVS

SEQ ID NO: 5526 - protein, 15 aa, synthetic construct
WIQLLPALLLPSLLC

SEQ ID NO: 5527 - protein, 15 aa, synthetic construct
WRPFLQSDPAFWGSC

SEQ ID NO: 5528 - protein, 15 aa, synthetic construct
WRRALATCDCGERRG

SEQ ID NO: 5529 - protein, 15 aa, synthetic construct
WSSPAPVRGARCKSS

SEQ ID NO: 5530 - protein, 15 aa, synthetic construct
AGGGPVQSVGRGAAA

SEQ ID NO: 5531 - protein, 15 aa, synthetic construct
AIQPVVAKFLGDPRA

SEQ ID NO: 5532 - protein, 15 aa, synthetic construct
ALPRGPAGRGAARPG

SEQ ID NO: 5533 - protein, 15 aa, synthetic construct
APAPAQPVASALRAA

SEQ ID NO: 5534 - protein, 15 aa, synthetic construct
APGRARGPAASDGSG

SEQ ID NO: 5535 - protein, 15 aa, synthetic construct
AWGGCPRRAAAARGG

SEQ ID NO: 5536 - protein, 15 aa, synthetic construct
AWSTSCPTPSSAAAC

SEQ ID NO: 5537 - protein, 15 aa, synthetic construct
CGWPTRPWVVTFSCW

SEQ ID NO: 5538 - protein, 15 aa, synthetic construct
CLGRLPAPSCCCPRR

SEQ ID NO: 5539 - protein, 15 aa, synthetic construct
CPSWWNASPTFRRGR

SEQ ID NO: 5540 - protein, 15 aa, synthetic construct
CSLWACPSWCSWWPR

SEQ ID NO: 5541 - protein, 15 aa, synthetic construct
DSDPPRVEEAHSRCP

SEQ ID NO: 5542 - protein, 15 aa, synthetic construct
ERQHGRWWGQRRQRR

SEQ ID NO: 5543 - protein, 15 aa, synthetic construct
ETPPPPPPPTPPPPP

SEQ ID NO: 5544 - protein, 15 aa, synthetic construct
EVVLGPSAAHRGCHS

SEQ ID NO: 5545 - protein, 15 aa, synthetic construct
GAPGSPRLLRPAVGL

SEQ ID NO: 5546 - protein, 15 aa, synthetic construct
GFGVHVWRGGPAVQR

SEQ ID NO: 5547 - protein, 15 aa, synthetic construct
GGEGGRPGHRGAAGH

SEQ ID NO: 5548 - protein, 15 aa, synthetic construct
GGGNAAVQFVRTAAS

SEQ ID NO: 5549 - protein, 15 aa, synthetic construct
GKKIAVPSDCGDPHS

SEQ ID NO: 5550 - protein, 15 aa, synthetic construct
GMLPSGNSWHTAPLS

SEQ ID NO: 5551 - protein, 15 aa, synthetic construct
GPWSSQTGQDCAGKA

SEQ ID NO: 5552 - protein, 15 aa, synthetic construct
GQAPPRRRRRRADPA

SEQ ID NO: 5553 - protein, 15 aa, synthetic construct
GRLQTGADPARRERM

SEQ ID NO: 5554 - protein, 15 aa, synthetic construct
GRRRRRRAAPHCQAR

SEQ ID NO: 5555 - protein, 15 aa, synthetic construct
GSRNSSWSLGAGPQS

SEQ ID NO: 5556 - protein, 15 aa, synthetic construct
GTGPLRRRRAAAPAL

SEQ ID NO: 5557 - protein, 15 aa, synthetic construct
IMRPLEQPQALLPGG

SEQ ID NO: 5558 - protein, 15 aa, synthetic construct
IVDGKKITTKRIIEN

SEQ ID NO: 5559 - protein, 15 aa, synthetic construct
KLFPSPGRLVRGPAR

SEQ ID NO: 5560 - protein, 15 aa, synthetic construct
KMAQSQIVTWKLERT

SEQ ID NO: 5561 - protein, 15 aa, synthetic construct
LARPPAPSSSSCRQE

SEQ ID NO: 5562 - protein, 15 aa, synthetic construct
LERVAGAAGAEHGVP

SEQ ID NO: 5563 - protein, 15 aa, synthetic construct
MEPVFGKRGQPAGSW

SEQ ID NO: 5564 - protein, 15 aa, synthetic construct
PMESCRSPGGGPRRA

SEQ ID NO: 5565 - protein, 15 aa, synthetic construct
PMGPRASRSCLPRHG

SEQ ID NO: 5566 - protein, 15 aa, synthetic construct
PPLRPLQLRAAPPGG

SEQ ID NO: 5567 - protein, 15 aa, synthetic construct
PRPAERRPRRAAPRA

SEQ ID NO: 5568 - protein, 15 aa, synthetic construct
QALLSSRRLLARKTP

SEQ ID NO: 5569 - protein, 15 aa, synthetic construct
QEVPARGLRPRSPPH

SEQ ID NO: 5570 - protein, 15 aa, synthetic construct
QPLRAGGPRGAEPRA

SEQ ID NO: 5571 - protein, 15 aa, synthetic construct
RAPRSRPRLRCPRRT

SEQ ID NO: 5572 - protein, 15 aa, synthetic construct
RGAVAPVGGPRGAVV

SEQ ID NO: 5573 - protein, 15 aa, synthetic construct
RGSRPSWATKRDPPP

SEQ ID NO: 5574 - protein, 15 aa, synthetic construct
RMGLGSMPALTAKIF

SEQ ID NO: 5575 - protein, 15 aa, synthetic construct
RPSTSTPTVWAAAAR

SEQ ID NO: 5576 - protein, 15 aa, synthetic construct
RRRRRARPRAGAAGG

SEQ ID NO: 5577 - protein, 15 aa, synthetic construct
RTGTASCPSPSCASR

SEQ ID NO: 5578 - protein, 15 aa, synthetic construct
SATAPARLSAGTGGS

SEQ ID NO: 5579 - protein, 15 aa, synthetic construct
SPAAVSPAAAPQAVG

SEQ ID NO: 5580 - protein, 15 aa, synthetic construct
SRRKGGRSKDSFPAL

SEQ ID NO: 5581 - protein, 15 aa, synthetic construct
TGSSRRPRRAAAAAA

SEQ ID NO: 5582 - protein, 15 aa, synthetic construct
VGVQAPAVAAVAAPA

SEQ ID NO: 5583 - protein, 15 aa, synthetic construct
WASLSPPSSPDYLAR

SEQ ID NO: 5584 - protein, 15 aa, synthetic construct
WASQCPGLGADGLKF

SEQ ID NO: 5585 - protein, 15 aa, synthetic construct
WPKEKAPRAAPRRGC

SEQ ID NO: 5586 - protein, 15 aa, synthetic construct
WPREPEESEGAVAAR

SEQ ID NO: 5587 - protein, 15 aa, synthetic construct
WPSEAASASPARPAR

SEQ ID NO: 5588 - protein, 15 aa, synthetic construct
WPSQAERAPALSQRT

SEQ ID NO: 5589 - protein, 15 aa, synthetic construct
WQLQRRRRAAPEMEL

SEQ ID NO: 5590 - protein, 15 aa, synthetic construct
WQPPPGTRTTSRAQA

SEQ ID NO: 5591 - protein, 15 aa, synthetic construct
WRFTFPRLRALPRCS

SEQ ID NO: 5592 - protein, 15 aa, synthetic construct
WRGGAATASSCCCCA

SEQ ID NO: 5593 - protein, 15 aa, synthetic construct
WRTGLRTFGSSSSSL

SEQ ID NO: 5594 - protein, 15 aa, synthetic construct
WSGAQEPSCCRCCCF

SEQ ID NO: 5595 - protein, 15 aa, synthetic construct
WVSPAWGSSSCCFLS

SEQ ID NO: 5596 - protein, 15 aa, synthetic construct
AAGFPRRGARPESRV

SEQ ID NO: 5597 - protein, 15 aa, synthetic construct
AAPAGPEPRPESPPA

SEQ ID NO: 5598 - protein, 15 aa, synthetic construct
AAVGRCSDLPWPRIS

SEQ ID NO: 5599 - protein, 15 aa, synthetic construct
AEGAGRSQPAGGRAG

SEQ ID NO: 5600 - protein, 15 aa, synthetic construct
AEWSTLQARLSAAGN

SEQ ID NO: 5601 - protein, 15 aa, synthetic construct
AGHSHLGPRQAPTSL

SEQ ID NO: 5602 - protein, 15 aa, synthetic construct
AGRAAGRAGARARPG

SEQ ID NO: 5603 - protein, 15 aa, synthetic construct
AGRPGAAAAGGCVAG

SEQ ID NO: 5604 - protein, 15 aa, synthetic construct
ALAGVAALRGRGASA

SEQ ID NO: 5605 - protein, 15 aa, synthetic construct
ARRGSSGRPSRRRRR

SEQ ID NO: 5606 - protein, 15 aa, synthetic construct
AVFLARRPKTAATTA

SEQ ID NO: 5607 - protein, 15 aa, synthetic construct
AVWASVPSPASICCG

SEQ ID NO: 5608 - protein, 15 aa, synthetic construct
AWRITASPREPGLRA

SEQ ID NO: 5609 - protein, 15 aa, synthetic construct
AWRLYLDTKDWREEL

SEQ ID NO: 5610 - protein, 15 aa, synthetic construct
AWRPGGERSRCLRAE

SEQ ID NO: 5611 - protein, 15 aa, synthetic construct
AWRSLRAGDRADVPG

SEQ ID NO: 5612 - protein, 15 aa, synthetic construct
CGCRSLQRSPMAAYF

SEQ ID NO: 5613 - protein, 15 aa, synthetic construct
CLTPEAGGTGPSSCA

SEQ ID NO: 5614 - protein, 15 aa, synthetic construct
DCQTAVCPRRAPGLQ

SEQ ID NO: 5615 - protein, 15 aa, synthetic construct
DTGGLRPCPLPLPGL

SEQ ID NO: 5616 - protein, 15 aa, synthetic construct
EDRLGDPSPPGGAPH

SEQ ID NO: 5617 - protein, 15 aa, synthetic construct
EERSAGDSGPLRTGT

SEQ ID NO: 5618 - protein, 15 aa, synthetic construct
ETLGPAGMSGAAEAV

SEQ ID NO: 5619 - protein, 15 aa, synthetic construct
GCDPAVPGLPGGSHL

SEQ ID NO: 5620 - protein, 15 aa, synthetic construct
GERGRRRGYREWSCG

SEQ ID NO: 5621 - protein, 15 aa, synthetic construct
GGGWAGPEPRGRRRR

SEQ ID NO: 5622 - protein, 15 aa, synthetic construct
GKTKVDTCLSSVNNH

SEQ ID NO: 5623 - protein, 15 aa, synthetic construct
GPGTETVHHYVPGSR

SEQ ID NO: 5624 - protein, 15 aa, synthetic construct
GTLLCFHGDYQADPQ

SEQ ID NO: 5625 - protein, 15 aa, synthetic construct
GWDRGRSRRRRRVPG

SEQ ID NO: 5626 - protein, 15 aa, synthetic construct
HGLRPRCLNRTPGRI

SEQ ID NO: 5627 - protein, 15 aa, synthetic construct
HLRLGPGRPGSERAV

SEQ ID NO: 5628 - protein, 15 aa, synthetic construct
LALGPGTGMDSPISW

SEQ ID NO: 5629 - protein, 15 aa, synthetic construct
LLAGPGRASAQHLRH

SEQ ID NO: 5630 - protein, 15 aa, synthetic construct
LLSFRAGRPRPGFRR

SEQ ID NO: 5631 - protein, 15 aa, synthetic construct
LRRIPGPAGDGDTPH

SEQ ID NO: 5632 - protein, 15 aa, synthetic construct
LRYGKGASGQRDWGA

SEQ ID NO: 5633 - protein, 15 aa, synthetic construct
PAGHRLWARGGCVAL

SEQ ID NO: 5634 - protein, 15 aa, synthetic construct
PFGHLRVLCLAARAQ

SEQ ID NO: 5635 - protein, 15 aa, synthetic construct
PGSVAAAAQGLPVPR

SEQ ID NO: 5636 - protein, 15 aa, synthetic construct
PPEPGHPCPAPRSLS

SEQ ID NO: 5637 - protein, 15 aa, synthetic construct
PRAQGAPKPLPGVSG

SEQ ID NO: 5638 - protein, 15 aa, synthetic construct
PRVSPGASWSHFPQE

SEQ ID NO: 5639 - protein, 15 aa, synthetic construct
PYGPRSRVPHPSVAE

SEQ ID NO: 5640 - protein, 15 aa, synthetic construct
QHRGRGKVRRGPRGV

SEQ ID NO: 5641 - protein, 15 aa, synthetic construct
QVRGPGGAAACSGVG

SEQ ID NO: 5642 - protein, 15 aa, synthetic construct
RDPELGSGLPARAAA

SEQ ID NO: 5643 - protein, 15 aa, synthetic construct
RIHQSVGARRSRGRR

SEQ ID NO: 5644 - protein, 15 aa, synthetic construct
SGHGGALACRHPCQQ

SEQ ID NO: 5645 - protein, 15 aa, synthetic construct
SLRGRAAEPPTLGDP

SEQ ID NO: 5646 - protein, 15 aa, synthetic construct
SNRCRVGGSAAASAT

SEQ ID NO: 5647 - protein, 15 aa, synthetic construct
SRRASWRDCRGELGK

SEQ ID NO: 5648 - protein, 15 aa, synthetic construct
TCSQGWCGTNASRHH

SEQ ID NO: 5649 - protein, 15 aa, synthetic construct
TLRPPGGSGPAVETH

SEQ ID NO: 5650 - protein, 15 aa, synthetic construct
TSAGHAVGSRLPRHP

SEQ ID NO: 5651 - protein, 15 aa, synthetic construct
WAPCGIYSTRSRRRS

SEQ ID NO: 5652 - protein, 15 aa, synthetic construct
WLFGGDQAAAEALLQ

SEQ ID NO: 5653 - protein, 15 aa, synthetic construct
WPWDRNCSSLCPGEQ

SEQ ID NO: 5654 - protein, 15 aa, synthetic construct
WRSDPGPRRGKQSLQ

SEQ ID NO: 5655 - protein, 15 aa, synthetic construct
WSSRRRRRPSRPKGR

SEQ ID NO: 5656 - protein, 15 aa, synthetic construct
ADAAASRAADLLAAR

SEQ ID NO: 5657 - protein, 15 aa, synthetic construct
ADAGERRGPGAWRRP

SEQ ID NO: 5658 - protein, 15 aa, synthetic construct
ADPGGRGAARGLAHS

SEQ ID NO: 5659 - protein, 15 aa, synthetic construct
ADSERPLWRSKAASG

SEQ ID NO: 5660 - protein, 15 aa, synthetic construct
AEAPALGPYHSHFKW

SEQ ID NO: 5661 - protein, 15 aa, synthetic construct
AEPPGPAGPAAAPRA

SEQ ID NO: 5662 - protein, 15 aa, synthetic construct
AEPPGPGRLPTAARR

SEQ ID NO: 5663 - protein, 15 aa, synthetic construct
AEPPHPGPGPAGAPC

SEQ ID NO: 5664 - protein, 15 aa, synthetic construct
AERAEGPSLGHVHPG

SEQ ID NO: 5665 - protein, 15 aa, synthetic construct
AESPATPLAIAQPVS

SEQ ID NO: 5666 - protein, 15 aa, synthetic construct
AEYPGQELLSHGHPR

SEQ ID NO: 5667 - protein, 15 aa, synthetic construct
AGAEGGAGGRGQLQH

SEQ ID NO: 5668 - protein, 15 aa, synthetic construct
AGAGGGRWWRGPASR

SEQ ID NO: 5669 - protein, 15 aa, synthetic construct
AGGAAAAHLLLPGHA

SEQ ID NO: 5670 - protein, 15 aa, synthetic construct
AGGAASRSGSKCWTE

SEQ ID NO: 5671 - protein, 15 aa, synthetic construct
AGGAGGQHQRSAGSA

SEQ ID NO: 5672 - protein, 15 aa, synthetic construct
AGGAGPSTPPPWVCG

SEQ ID NO: 5673 - protein, 15 aa, synthetic construct
AGGAWRREASPEEKS

SEQ ID NO: 5674 - protein, 15 aa, synthetic construct
AGGGAPQPVLPATLL

SEQ ID NO: 5675 - protein, 15 aa, synthetic construct
AGGGRRHRGAGRGAE

SEQ ID NO: 5676 - protein, 15 aa, synthetic construct
AGGGRRVPAAGCTVF

SEQ ID NO: 5677 - protein, 15 aa, synthetic construct
AGGGSPPRALAALEP

SEQ ID NO: 5678 - protein, 15 aa, synthetic construct
AGGSARGPGEGQLQS

SEQ ID NO: 5679 - protein, 15 aa, synthetic construct
AGRRLLRRRRAGRRL

SEQ ID NO: 5680 - protein, 15 aa, synthetic construct
APPRHPPRTASSARG

SEQ ID NO: 5681 - protein, 15 aa, synthetic construct
APPRLPAPGVAALRV

SEQ ID NO: 5682 - protein, 15 aa, synthetic construct
APPRPAPARPRSCTT

SEQ ID NO: 5683 - protein, 15 aa, synthetic construct
ARLRPRPRPRSPRPR

SEQ ID NO: 5684 - protein, 15 aa, synthetic construct
ARRGPAALTAPSARR

SEQ ID NO: 5685 - protein, 15 aa, synthetic construct
ARRGRLRGSDSHPGA

SEQ ID NO: 5686 - protein, 15 aa, synthetic construct
AVRLRRRAVARGDRR

SEQ ID NO: 5687 - protein, 15 aa, synthetic construct
AWGALEEPRPQGAAA

SEQ ID NO: 5688 - protein, 15 aa, synthetic construct
CLRPAAPERRVPPRC

SEQ ID NO: 5689 - protein, 15 aa, synthetic construct
DRGLGAGGRAAAPRA

SEQ ID NO: 5690 - protein, 15 aa, synthetic construct
EHRGGVLRGHFQSAL

SEQ ID NO: 5691 - protein, 15 aa, synthetic construct
EPWAFTQASTFPSLG

SEQ ID NO: 5692 - protein, 15 aa, synthetic construct
FHRAEPRQDERGVAA

SEQ ID NO: 5693 - protein, 15 aa, synthetic construct
GAGGAGAGRGEDELL

SEQ ID NO: 5694 - protein, 15 aa, synthetic construct
GAGGSAARPPGGTVP

SEQ ID NO: 5695 - protein, 15 aa, synthetic construct
GGGAAAAAAACPAPA

SEQ ID NO: 5696 - protein, 15 aa, synthetic construct
GGGAAALPDGGGCGA

SEQ ID NO: 5697 - protein, 15 aa, synthetic construct
GGGAGPRGARGGAAA

SEQ ID NO: 5698 - protein, 15 aa, synthetic construct
GGGGAPRARAAAEDL

SEQ ID NO: 5699 - protein, 15 aa, synthetic construct
GGGGASRAPAPASAV

SEQ ID NO: 5700 - protein, 15 aa, synthetic construct
GGGGPAAAGHVHGGR

SEQ ID NO: 5701 - protein, 15 aa, synthetic construct
GPTSSSKSSLRTGRT

SEQ ID NO: 5702 - protein, 15 aa, synthetic construct
KSRATASASGTWRPS

SEQ ID NO: 5703 - protein, 15 aa, synthetic construct
LGGGAGLPPGPAPRG

SEQ ID NO: 5704 - protein, 15 aa, synthetic construct
LRKTSCWKLRLVGWR

SEQ ID NO: 5705 - protein, 15 aa, synthetic construct
PGGARRPGASGPGSG

SEQ ID NO: 5706 - protein, 15 aa, synthetic construct
PTQGSGGGGRRLPKR

SEQ ID NO: 5707 - protein, 15 aa, synthetic construct
RAGGAGTHGHLAGRH

SEQ ID NO: 5708 - protein, 15 aa, synthetic construct
RDTPCGPGGGGRGGG

SEQ ID NO: 5709 - protein, 15 aa, synthetic construct
RPGRRRTARLPAARP

SEQ ID NO: 5710 - protein, 15 aa, synthetic construct
RTPPVTKSAPSSRDC

SEQ ID NO: 5711 - protein, 15 aa, synthetic construct
SGGAGGAGGGGGSGP

SEQ ID NO: 5712 - protein, 15 aa, synthetic construct
SGIPARLPRALQEAF

SEQ ID NO: 5713 - protein, 15 aa, synthetic construct
SPSRSATFRSAPTSS

SEQ ID NO: 5714 - protein, 15 aa, synthetic construct
TCSCCWIFCCSLLVE

SEQ ID NO: 5715 - protein, 15 aa, synthetic construct
TTRSARMGTSLPTTW

SEQ ID NO: 5716 - protein, 15 aa, synthetic construct
VPGPGGAGGAGARQP

SEQ ID NO: 5717 - protein, 15 aa, synthetic construct
WRGPGSVLQRGTVTR

SEQ ID NO: 5718 - protein, 15 aa, synthetic construct
AAAASGDPGSPSPLS

SEQ ID NO: 5719 - protein, 15 aa, synthetic construct
AGGRARGALRALRLH

SEQ ID NO: 5720 - protein, 15 aa, synthetic construct
AGIGSCWRQPRPPRT

SEQ ID NO: 5721 - protein, 15 aa, synthetic construct
AGRRRSRPAADPPAP

SEQ ID NO: 5722 - protein, 15 aa, synthetic construct
AKQPDGLRGRRWGSQ

SEQ ID NO: 5723 - protein, 15 aa, synthetic construct
AKSPEEHGGTAAGRL

SEQ ID NO: 5724 - protein, 15 aa, synthetic construct
ALQLRRRPSGGLLRE

SEQ ID NO: 5725 - protein, 15 aa, synthetic construct
APQAGPGHLVVLVHL

SEQ ID NO: 5726 - protein, 15 aa, synthetic construct
ASACSVPALGPGNGD

SEQ ID NO: 5727 - protein, 15 aa, synthetic construct
ASRCRASLRRAGGRG

SEQ ID NO: 5728 - protein, 15 aa, synthetic construct
AYRKVLFLFGAHLSW

SEQ ID NO: 5729 - protein, 15 aa, synthetic construct
CHSQGDPRQGWGLEG

SEQ ID NO: 5730 - protein, 15 aa, synthetic construct
CLGMRSWSWAPRAAG

SEQ ID NO: 5731 - protein, 15 aa, synthetic construct
CRPRRWCRSAWRTAA

SEQ ID NO: 5732 - protein, 15 aa, synthetic construct
CSLSRQSYGCPIRAK

SEQ ID NO: 5733 - protein, 15 aa, synthetic construct
CSRTLRPQPRPRLPR

SEQ ID NO: 5734 - protein, 15 aa, synthetic construct
CTARCTRSARRSPTR

SEQ ID NO: 5735 - protein, 15 aa, synthetic construct
CVSKSVISVRGPSIL

SEQ ID NO: 5736 - protein, 15 aa, synthetic construct
CWRPCAGRAACAAFT

SEQ ID NO: 5737 - protein, 15 aa, synthetic construct
ECIPHQATQLQPGVR

SEQ ID NO: 5738 - protein, 15 aa, synthetic construct
EGRGPRRPGALLQPG

SEQ ID NO: 5739 - protein, 15 aa, synthetic construct
EKGAPRRWRLWRAPP

SEQ ID NO: 5740 - protein, 15 aa, synthetic construct
ELPGRPKARSQCPGR

SEQ ID NO: 5741 - protein, 15 aa, synthetic construct
EQSGQSWRRLWRRRQ

SEQ ID NO: 5742 - protein, 15 aa, synthetic construct
ESAALRAGAPAALAL

SEQ ID NO: 5743 - protein, 15 aa, synthetic construct
FFVYFWECLGLAPNR

SEQ ID NO: 5744 - protein, 15 aa, synthetic construct
FGILWRRKPREAPFL

SEQ ID NO: 5745 - protein, 15 aa, synthetic construct
FVQCQFRQPRHDEWR

SEQ ID NO: 5746 - protein, 15 aa, synthetic construct
GADGRARGAQRLHPS

SEQ ID NO: 5747 - protein, 15 aa, synthetic construct
GAEDSEEEGAWGRGE

SEQ ID NO: 5748 - protein, 15 aa, synthetic construct
GAGRWLLRAGPLWVR

SEQ ID NO: 5749 - protein, 15 aa, synthetic construct
GEYTDLLYQLPLWLA

SEQ ID NO: 5750 - protein, 15 aa, synthetic construct
GFAFCFTDGPGGAQL

SEQ ID NO: 5751 - protein, 15 aa, synthetic construct
GGAGEAEAVRCLPQD

SEQ ID NO: 5752 - protein, 15 aa, synthetic construct
GGAHGRGLLPLHRGL

SEQ ID NO: 5753 - protein, 15 aa, synthetic construct
GGGCLLLVLVYLHLH

SEQ ID NO: 5754 - protein, 15 aa, synthetic construct
GGGGRARGCAVPAAV

SEQ ID NO: 5755 - protein, 15 aa, synthetic construct
GGGGRRRRWRQQQSS

SEQ ID NO: 5756 - protein, 15 aa, synthetic construct
GGQSGACCAEKASLI

SEQ ID NO: 5757 - protein, 15 aa, synthetic construct
GGTRRGGRWSRRRRG

SEQ ID NO: 5758 - protein, 15 aa, synthetic construct
GHEPFAGLVPEPGRG

SEQ ID NO: 5759 - protein, 15 aa, synthetic construct
GLHFRCVLLHAVSGA

SEQ ID NO: 5760 - protein, 15 aa, synthetic construct
GPGRPGGVCGGRQSR

SEQ ID NO: 5761 - protein, 15 aa, synthetic construct
GRAGLAAPRVPGGLG

SEQ ID NO: 5762 - protein, 15 aa, synthetic construct
GRCRPEEDEGASTSE

SEQ ID NO: 5763 - protein, 15 aa, synthetic construct
GRGGGGRAAGGAPRG

SEQ ID NO: 5764 - protein, 15 aa, synthetic construct
GRGGGLGLRASRWPG

SEQ ID NO: 5765 - protein, 15 aa, synthetic construct
GRGPRRLPGRSGGGW

SEQ ID NO: 5766 - protein, 15 aa, synthetic construct
GRLQWLWDRLHSLPP

SEQ ID NO: 5767 - protein, 15 aa, synthetic construct
GRQEQETQGSSGRGG

SEQ ID NO: 5768 - protein, 15 aa, synthetic construct
GSAEPEHLLPVAAIP

SEQ ID NO: 5769 - protein, 15 aa, synthetic construct
GSRGAARGGGRAGPG

SEQ ID NO: 5770 - protein, 15 aa, synthetic construct
GVRRGRDLPGARAKQ

SEQ ID NO: 5771 - protein, 15 aa, synthetic construct
HRCRCRCRLQGAPCQ

SEQ ID NO: 5772 - protein, 15 aa, synthetic construct
LAGRHGAGHERGGAP

SEQ ID NO: 5773 - protein, 15 aa, synthetic construct
LAPGAGHTDTRHQLP

SEQ ID NO: 5774 - protein, 15 aa, synthetic construct
LAVLLPGLCLRAHGQ

SEQ ID NO: 5775 - protein, 15 aa, synthetic construct
LPFAPGAESTLREQQ

SEQ ID NO: 5776 - protein, 15 aa, synthetic construct
LPFQKAWAERGCWTQ

SEQ ID NO: 5777 - protein, 15 aa, synthetic construct
LWPRRQRPARTAPLR

SEQ ID NO: 5778 - protein, 15 aa, synthetic construct
PGEQEEAHRAERLLP

SEQ ID NO: 5779 - protein, 15 aa, synthetic construct
PGRRVCFQSQICRGW

SEQ ID NO: 5780 - protein, 15 aa, synthetic construct
PPAEASQLLRPLRVG

SEQ ID NO: 5781 - protein, 15 aa, synthetic construct
QEGAEDRDRGRRRLR

SEQ ID NO: 5782 - protein, 15 aa, synthetic construct
QGEGPVLGCLGAPRG

SEQ ID NO: 5783 - protein, 15 aa, synthetic construct
QGRGAGGRSTGAVRG

SEQ ID NO: 5784 - protein, 15 aa, synthetic construct
QLGKRPRVRGRGTES

SEQ ID NO: 5785 - protein, 15 aa, synthetic construct
RAAAAGQGGPGHQRR

SEQ ID NO: 5786 - protein, 15 aa, synthetic construct
RAAGSSPRWAASAMR

SEQ ID NO: 5787 - protein, 15 aa, synthetic construct
RAASAKGLRKSAAAV

SEQ ID NO: 5788 - protein, 15 aa, synthetic construct
RAATAPAGPRSKPPS

SEQ ID NO: 5789 - protein, 15 aa, synthetic construct
RAQGPAGHRHPGGPG

SEQ ID NO: 5790 - protein, 15 aa, synthetic construct
RFSLPRFSTPRWGTW

SEQ ID NO: 5791 - protein, 15 aa, synthetic construct
RGQPRPSQGGPLARG

SEQ ID NO: 5792 - protein, 15 aa, synthetic construct
RPLPLRHARGPEPGG

SEQ ID NO: 5793 - protein, 15 aa, synthetic construct
RPPSWPRPPRRPRPP

SEQ ID NO: 5794 - protein, 15 aa, synthetic construct
RPQLLPQVHLRVLRE

SEQ ID NO: 5795 - protein, 15 aa, synthetic construct
RQRRAEIRGLRCALE

SEQ ID NO: 5796 - protein, 15 aa, synthetic construct
RRQHLRQPVPAARRQ

SEQ ID NO: 5797 - protein, 15 aa, synthetic construct
RRRLPPPRPRLPPPP

SEQ ID NO: 5798 - protein, 15 aa, synthetic construct
RRRRSAAALAAAAEL

SEQ ID NO: 5799 - protein, 15 aa, synthetic construct
RSGSARTTRDFARVC

SEQ ID NO: 5800 - protein, 15 aa, synthetic construct
SGPPCLLPEPNLPRL

SEQ ID NO: 5801 - protein, 15 aa, synthetic construct
SGTRIKGSVSGYAHR

SEQ ID NO: 5802 - protein, 15 aa, synthetic construct
SKRAPRRTRQARPPG

SEQ ID NO: 5803 - protein, 15 aa, synthetic construct
SLCISGNVLGWRRTA

SEQ ID NO: 5804 - protein, 15 aa, synthetic construct
SRRRSSSSSSRRSSR

SEQ ID NO: 5805 - protein, 15 aa, synthetic construct
SSLDSHGGDCGDGGS

SEQ ID NO: 5806 - protein, 15 aa, synthetic construct
TAAAAAGAAGARAPL

SEQ ID NO: 5807 - protein, 15 aa, synthetic construct
TAAAAALRARRGRRP

SEQ ID NO: 5808 - protein, 15 aa, synthetic construct
TAAAAASAASGGGGG

SEQ ID NO: 5809 - protein, 15 aa, synthetic construct
TAAAAGPAGLWLGLR

SEQ ID NO: 5810 - protein, 15 aa, synthetic construct
TAAARRSTTTRGGAA

SEQ ID NO: 5811 - protein, 15 aa, synthetic construct
TAASAAASGAEQRRR

SEQ ID NO: 5812 - protein, 15 aa, synthetic construct
TAASSSPASCWCSRR

SEQ ID NO: 5813 - protein, 15 aa, synthetic construct
TAAWPWSRGPVGPLG

SEQ ID NO: 5814 - protein, 15 aa, synthetic construct
TATPTRRSTSSPRPT

SEQ ID NO: 5815 - protein, 15 aa, synthetic construct
TLASFPNPTRSSSSP

SEQ ID NO: 5816 - protein, 15 aa, synthetic construct
TQSPSRSTGQDVAAE

SEQ ID NO: 5817 - protein, 15 aa, synthetic construct
TRACRGRVWQLTSWC

SEQ ID NO: 5818 - protein, 15 aa, synthetic construct
TRAGRGRRRGPLGQA

SEQ ID NO: 5819 - protein, 15 aa, synthetic construct
TRAHRPLARAPCAST

SEQ ID NO: 5820 - protein, 15 aa, synthetic construct
TRAHVECPPAHVPMW

SEQ ID NO: 5821 - protein, 15 aa, synthetic construct
TRAQHGGAAARLPAE

SEQ ID NO: 5822 - protein, 15 aa, synthetic construct
TRARKSGGARQARRN

SEQ ID NO: 5823 - protein, 15 aa, synthetic construct
TRARRTARRAATCRC

SEQ ID NO: 5824 - protein, 15 aa, synthetic construct
TRASAARPPEAPPPR

SEQ ID NO: 5825 - protein, 15 aa, synthetic construct
TRSAPGLGAYSSQSS

SEQ ID NO: 5826 - protein, 15 aa, synthetic construct
TRSAPTSHASWCPTL

SEQ ID NO: 5827 - protein, 15 aa, synthetic construct
TRSGASATTSPCARA

SEQ ID NO: 5828 - protein, 15 aa, synthetic construct
TRTRRHISVPAHAEI

SEQ ID NO: 5829 - protein, 15 aa, synthetic construct
TRVPRARSTWLAFCA

SEQ ID NO: 5830 - protein, 15 aa, synthetic construct
TRVRWGPDLDGALGQ

SEQ ID NO: 5831 - protein, 15 aa, synthetic construct
TRVSSPSAAPTRRAG

SEQ ID NO: 5832 - protein, 15 aa, synthetic construct
TSAAAAPAAWEPRAR

SEQ ID NO: 5833 - protein, 15 aa, synthetic construct
TSAAAESGAGTGERP

SEQ ID NO: 5834 - protein, 15 aa, synthetic construct
TSAPSTSARTWSRWA

SEQ ID NO: 5835 - protein, 15 aa, synthetic construct
TSASGACRRCARTWS

SEQ ID NO: 5836 - protein, 15 aa, synthetic construct
TTSAAGHSGTQGAAA

SEQ ID NO: 5837 - protein, 15 aa, synthetic construct
WAHRLQTELAASRTV

SEQ ID NO: 5838 - protein, 15 aa, synthetic construct
WARTRTRGKLTTASC

SEQ ID NO: 5839 - protein, 15 aa, synthetic construct
WPGRARRAARPGGPR

SEQ ID NO: 5840 - protein, 15 aa, synthetic construct
WPWRWPRAPRLPVAR

SEQ ID NO: 5841 - protein, 15 aa, synthetic construct
WQRRTAAGLVGPLWG

SEQ ID NO: 5842 - protein, 15 aa, synthetic construct
WRPEWSVLCRKGKSY

SEQ ID NO: 5843 - protein, 15 aa, synthetic construct
WRRQRCQSLGRSWSW

SEQ ID NO: 5844 - protein, 15 aa, synthetic construct
WRRRRQLVRPPGCRV

SEQ ID NO: 5845 - protein, 15 aa, synthetic construct
WRTRRPPRWASGCCC

SEQ ID NO: 5846 - protein, 15 aa, synthetic construct
WSWSLVATSRSSLGS

SEQ ID NO: 5847 - protein, 15 aa, synthetic construct
WTARPPPSPWTSRRW

SEQ ID NO: 5848 - protein, 15 aa, synthetic construct
AALPQPGVAERPGRA

SEQ ID NO: 5849 - protein, 15 aa, synthetic construct
AGAAAGGSCQLQPLP

SEQ ID NO: 5850 - protein, 15 aa, synthetic construct
AGGPLPAAVRALLFL

SEQ ID NO: 5851 - protein, 15 aa, synthetic construct
AGQGTDPLLDRPGAA

SEQ ID NO: 5852 - protein, 15 aa, synthetic construct
AGRGRRWARRHGAEE

SEQ ID NO: 5853 - protein, 15 aa, synthetic construct
APTCASPRGPPSPAP

SEQ ID NO: 5854 - protein, 15 aa, synthetic construct
ASLPATVGVGAGLGR

SEQ ID NO: 5855 - protein, 15 aa, synthetic construct
ASPRGTMVASLLPSR

SEQ ID NO: 5856 - protein, 15 aa, synthetic construct
AVLPAGEGQQPPQCE

SEQ ID NO: 5857 - protein, 15 aa, synthetic construct
AVPGRPGQLRLRAQP

SEQ ID NO: 5858 - protein, 15 aa, synthetic construct
CGCWPGGGARGGWWI

SEQ ID NO: 5859 - protein, 15 aa, synthetic construct
CPNSRRPVGWGVRKN

SEQ ID NO: 5860 - protein, 15 aa, synthetic construct
EDPGPSCRGAPLPPG

SEQ ID NO: 5861 - protein, 15 aa, synthetic construct
FPRPRAAEPSLGGGR

SEQ ID NO: 5862 - protein, 15 aa, synthetic construct
GAAPAAAAGAVVPAG

SEQ ID NO: 5863 - protein, 15 aa, synthetic construct
GACLPSWLPGAQHNL

SEQ ID NO: 5864 - protein, 15 aa, synthetic construct
GAELPADPAGGGRVP

SEQ ID NO: 5865 - protein, 15 aa, synthetic construct
GAFLPGLRAERVCGE

SEQ ID NO: 5866 - protein, 15 aa, synthetic construct
GAGLPREGHQVPQPG

SEQ ID NO: 5867 - protein, 15 aa, synthetic construct
GALGADDGAEAEAAA

SEQ ID NO: 5868 - protein, 15 aa, synthetic construct
GALPACPPDSFCTRL

SEQ ID NO: 5869 - protein, 15 aa, synthetic construct
GALPAPRLPREPACP

SEQ ID NO: 5870 - protein, 15 aa, synthetic construct
GAPFQLRLLCEPRSG

SEQ ID NO: 5871 - protein, 15 aa, synthetic construct
GAPGALGARSRVRLQ

SEQ ID NO: 5872 - protein, 15 aa, synthetic construct
GAPGRTGPGARGPAA

SEQ ID NO: 5873 - protein, 15 aa, synthetic construct
GFAVPEVHWQDQHLE

SEQ ID NO: 5874 - protein, 15 aa, synthetic construct
GFLLPTESPGGPPNL

SEQ ID NO: 5875 - protein, 15 aa, synthetic construct
GGAALPGGARGPGPA

SEQ ID NO: 5876 - protein, 15 aa, synthetic construct
GGAFASLTAPFAPSA

SEQ ID NO: 5877 - protein, 15 aa, synthetic construct
GGAICVGHYQKSLHV

SEQ ID NO: 5878 - protein, 15 aa, synthetic construct
GGAIGGGGSASPDPA

SEQ ID NO: 5879 - protein, 15 aa, synthetic construct
GGALARLRQGLPVAP

SEQ ID NO: 5880 - protein, 15 aa, synthetic construct
GGALGGIFPTGFARE

SEQ ID NO: 5881 - protein, 15 aa, synthetic construct
GGALGLHHRPEGVSG

SEQ ID NO: 5882 - protein, 15 aa, synthetic construct
GGALGPGEQAQVVPQ

SEQ ID NO: 5883 - protein, 15 aa, synthetic construct
GGALKLRGSGLPARR

SEQ ID NO: 5884 - protein, 15 aa, synthetic construct
GGALRLHQVPPALPL

SEQ ID NO: 5885 - protein, 15 aa, synthetic construct
GGALVASRAVRVSEM

SEQ ID NO: 5886 - protein, 15 aa, synthetic construct
GGDLPSTSGADPLPL

SEQ ID NO: 5887 - protein, 15 aa, synthetic construct
GGEVPDIEGRAHRRS

SEQ ID NO: 5888 - protein, 15 aa, synthetic construct
GGFLPSPGDPGPAHA

SEQ ID NO: 5889 - protein, 15 aa, synthetic construct
GGGPRAARPPQPRRA

SEQ ID NO: 5890 - protein, 15 aa, synthetic construct
GGGSEPGVDLPAPVL

SEQ ID NO: 5891 - protein, 15 aa, synthetic construct
GGLHLAAEADLLALQ

SEQ ID NO: 5892 - protein, 15 aa, synthetic construct
GGLPAPAAALPPGRG

SEQ ID NO: 5893 - protein, 15 aa, synthetic construct
GGLPGDWHPQPLFCL

SEQ ID NO: 5894 - protein, 15 aa, synthetic construct
GGLRGLEAPCPSRGD

SEQ ID NO: 5895 - protein, 15 aa, synthetic construct
GGLRVWSASAKQYWE

SEQ ID NO: 5896 - protein, 15 aa, synthetic construct
GGNSPRFLAATQRLL

SEQ ID NO: 5897 - protein, 15 aa, synthetic construct
GGPAAAARFARHRGR

SEQ ID NO: 5898 - protein, 15 aa, synthetic construct
GGPAARVEHRGRPAR

SEQ ID NO: 5899 - protein, 15 aa, synthetic construct
GGPACQPMRGCACSS

SEQ ID NO: 5900 - protein, 15 aa, synthetic construct
GGPAEAAGSSAGPGG

SEQ ID NO: 5901 - protein, 15 aa, synthetic construct
GGPAGCAGRVGAVPA

SEQ ID NO: 5902 - protein, 15 aa, synthetic construct
GGPAGGRHCRGWHPL

SEQ ID NO: 5903 - protein, 15 aa, synthetic construct
GGPAGPRAPLHRAAH

SEQ ID NO: 5904 - protein, 15 aa, synthetic construct
GGPALSGKYRRVRHG

SEQ ID NO: 5905 - protein, 15 aa, synthetic construct
GGPAQPVGHLRRVPP

SEQ ID NO: 5906 - protein, 15 aa, synthetic construct
GGPDVLLPRQPPGPG

SEQ ID NO: 5907 - protein, 15 aa, synthetic construct
GGPEAAGPAQFPGHG

SEQ ID NO: 5908 - protein, 15 aa, synthetic construct
GGPEATGPAKVPRHG

SEQ ID NO: 5909 - protein, 15 aa, synthetic construct
GGPEEGPRGRAPPAA

SEQ ID NO: 5910 - protein, 15 aa, synthetic construct
GGPELHRRYRRLPRE

SEQ ID NO: 5911 - protein, 15 aa, synthetic construct
GGPEQQGQQEARDPG

SEQ ID NO: 5912 - protein, 15 aa, synthetic construct
GGPGAGAEAGPGTGA

SEQ ID NO: 5913 - protein, 15 aa, synthetic construct
GGPGAGTLGTAVSPA

SEQ ID NO: 5914 - protein, 15 aa, synthetic construct
GGPGALEAAGVLRAA

SEQ ID NO: 5915 - protein, 15 aa, synthetic construct
GGPGLWQRDTVQEYG

SEQ ID NO: 5916 - protein, 15 aa, synthetic construct
GGPGPPAAASPLDRL

SEQ ID NO: 5917 - protein, 15 aa, synthetic construct
GGPGPPGPEAPAACL

SEQ ID NO: 5918 - protein, 15 aa, synthetic construct
GGPGPSAHLGHHLLP

SEQ ID NO: 5919 - protein, 15 aa, synthetic construct
GGPHRPLIYVSLVQE

SEQ ID NO: 5920 - protein, 15 aa, synthetic construct
GGPPALLPEVGKQGG

SEQ ID NO: 5921 - protein, 15 aa, synthetic construct
GGPPARPAAWVSCPW

SEQ ID NO: 5922 - protein, 15 aa, synthetic construct
GGPPGPALPGRCLGG

SEQ ID NO: 5923 - protein, 15 aa, synthetic construct
GGPPPPAAGVPGAGE

SEQ ID NO: 5924 - protein, 15 aa, synthetic construct
GGPQPGGHGAAPGGA

SEQ ID NO: 5925 - protein, 15 aa, synthetic construct
GGPQQAGHLDHLQAP

SEQ ID NO: 5926 - protein, 15 aa, synthetic construct
GGPRLPPLLLPADLL

SEQ ID NO: 5927 - protein, 15 aa, synthetic construct
GGPRPEGPAAAAAAA

SEQ ID NO: 5928 - protein, 15 aa, synthetic construct
GGPRVRAGFESRHCR

SEQ ID NO: 5929 - protein, 15 aa, synthetic construct
GGPSVGGRVGPAGPA

SEQ ID NO: 5930 - protein, 15 aa, synthetic construct
GGPTAVRHCVLSPAP

SEQ ID NO: 5931 - protein, 15 aa, synthetic construct
GGPTGLHPELHGEAT

SEQ ID NO: 5932 - protein, 15 aa, synthetic construct
GGPTGRGQRGSGDMR

SEQ ID NO: 5933 - protein, 15 aa, synthetic construct
GGQFPSIFWEAEPPA

SEQ ID NO: 5934 - protein, 15 aa, synthetic construct
GGRFPGHLEASGQQE

SEQ ID NO: 5935 - protein, 15 aa, synthetic construct
GGRGGGGGGGGRRRR

SEQ ID NO: 5936 - protein, 15 aa, synthetic construct
GGRLLGPGGLDSGPE

SEQ ID NO: 5937 - protein, 15 aa, synthetic construct
GGSPGELLCSSPLSL

SEQ ID NO: 5938 - protein, 15 aa, synthetic construct
GGSVPERLWLGATAA

SEQ ID NO: 5939 - protein, 15 aa, synthetic construct
GGSVPGSEWVGPGAG

SEQ ID NO: 5940 - protein, 15 aa, synthetic construct
GGTGAGGQGWEAPGE

SEQ ID NO: 5941 - protein, 15 aa, synthetic construct
GGVCSPLRRGPVARM

SEQ ID NO: 5942 - protein, 15 aa, synthetic construct
GGVFPAGPVSQPLLQ

SEQ ID NO: 5943 - protein, 15 aa, synthetic construct
GGVLPGTEAVPPGSK

SEQ ID NO: 5944 - protein, 15 aa, synthetic construct
GHGGPQGVRGGGAPD

SEQ ID NO: 5945 - protein, 15 aa, synthetic construct
GHLLAGPVGLSLLPD

SEQ ID NO: 5946 - protein, 15 aa, synthetic construct
GHPLGGGPRGRHPLR

SEQ ID NO: 5947 - protein, 15 aa, synthetic construct
GIPGTSRAPLCAPRL

SEQ ID NO: 5948 - protein, 15 aa, synthetic construct
GKNIVTFPPGSCGCM

SEQ ID NO: 5949 - protein, 15 aa, synthetic construct
GKPSPAQQRRQDAHP

SEQ ID NO: 5950 - protein, 15 aa, synthetic construct
GKPVGNPGEPGPGPR

SEQ ID NO: 5951 - protein, 15 aa, synthetic construct
GLGTCPPPPAARFLL

SEQ ID NO: 5952 - protein, 15 aa, synthetic construct
GLPLGLGLLRTNEES

SEQ ID NO: 5953 - protein, 15 aa, synthetic construct
GLPLLRGWLQQPQQL

SEQ ID NO: 5954 - protein, 15 aa, synthetic construct
GPPLRTLRQGAARHG

SEQ ID NO: 5955 - protein, 15 aa, synthetic construct
GPPSPPAPASVFSGA

SEQ ID NO: 5956 - protein, 15 aa, synthetic construct
GQPAPQPQRLPCALV

SEQ ID NO: 5957 - protein, 15 aa, synthetic construct
GRLPGGLRGGCGNPE

SEQ ID NO: 5958 - protein, 15 aa, synthetic construct
GSALLPGRLRRGRIR

SEQ ID NO: 5959 - protein, 15 aa, synthetic construct
GSAPGLVGGWQRAAL

SEQ ID NO: 5960 - protein, 15 aa, synthetic construct
GSAPPRARAALRAVP

SEQ ID NO: 5961 - protein, 15 aa, synthetic construct
GSHLPTASPSVLPAS

SEQ ID NO: 5962 - protein, 15 aa, synthetic construct
GSLIPGNYRCFSLWC

SEQ ID NO: 5963 - protein, 15 aa, synthetic construct
GSLLPALRVRARELQ

SEQ ID NO: 5964 - protein, 15 aa, synthetic construct
GSLVPDRRARAAPPD

SEQ ID NO: 5965 - protein, 15 aa, synthetic construct
GSPIYEGKTGLLGGP

SEQ ID NO: 5966 - protein, 15 aa, synthetic construct
GSPLKMAAAAMRLRT

SEQ ID NO: 5967 - protein, 15 aa, synthetic construct
GSPLLRASSTQDGEW

SEQ ID NO: 5968 - protein, 15 aa, synthetic construct
GSPLSPTPCHAGCEQ

SEQ ID NO: 5969 - protein, 15 aa, synthetic construct
GTAVPGGAGRLPLRV

SEQ ID NO: 5970 - protein, 15 aa, synthetic construct
GTELPDLGRLPPAPP

SEQ ID NO: 5971 - protein, 15 aa, synthetic construct
GTGLPLLPVGRSPRG

SEQ ID NO: 5972 - protein, 15 aa, synthetic construct
GTTLPPLRLQHVPLR

SEQ ID NO: 5973 - protein, 15 aa, synthetic construct
HIPVPHALGFGASAG

SEQ ID NO: 5974 - protein, 15 aa, synthetic construct
HPAAGLAPHSQHLPQ

SEQ ID NO: 5975 - protein, 15 aa, synthetic construct
LGHHSPPAGLKGPRQ

SEQ ID NO: 5976 - protein, 15 aa, synthetic construct
LLRLPVPAAARPAAA

SEQ ID NO: 5977 - protein, 15 aa, synthetic construct
LNSSRYLRAAAALSQ

SEQ ID NO: 5978 - protein, 15 aa, synthetic construct
LPAAPGWRLQPSRGF

SEQ ID NO: 5979 - protein, 15 aa, synthetic construct
LPALGRRSPAPAARG

SEQ ID NO: 5980 - protein, 15 aa, synthetic construct
LPALSVPQHPLRAHR

SEQ ID NO: 5981 - protein, 15 aa, synthetic construct
LPAPQPRLPARLAQR

SEQ ID NO: 5982 - protein, 15 aa, synthetic construct
LPAPQRLRGGHPGAE

SEQ ID NO: 5983 - protein, 15 aa, synthetic construct
LPASPQPRGAQPDAR

SEQ ID NO: 5984 - protein, 15 aa, synthetic construct
LPAVPAAQAALLLPG

SEQ ID NO: 5985 - protein, 15 aa, synthetic construct
LPERPAHGARTPRLR

SEQ ID NO: 5986 - protein, 15 aa, synthetic construct
LPETPRAACPKSPLR

SEQ ID NO: 5987 - protein, 15 aa, synthetic construct
LPEWSARRGPHGFRL

SEQ ID NO: 5988 - protein, 15 aa, synthetic construct
LPGGQPYRQQVRIHQ

SEQ ID NO: 5989 - protein, 15 aa, synthetic construct
LPGLLPRRGDPLPER

SEQ ID NO: 5990 - protein, 15 aa, synthetic construct
LPGLPLRRRRRQDGR

SEQ ID NO: 5991 - protein, 15 aa, synthetic construct
LPGPGPRRQGRPESR

SEQ ID NO: 5992 - protein, 15 aa, synthetic construct
LPGPLRRVPRTAESR

SEQ ID NO: 5993 - protein, 15 aa, synthetic construct
LPGRSGFVLGEQHGR

SEQ ID NO: 5994 - protein, 15 aa, synthetic construct
LPGSGGLYREPAATA

SEQ ID NO: 5995 - protein, 15 aa, synthetic construct
LPGVQLPAPPRAGLE

SEQ ID NO: 5996 - protein, 15 aa, synthetic construct
LPLLPRAHTALAEQP

SEQ ID NO: 5997 - protein, 15 aa, synthetic construct
LPLLRETRKLGALRG

SEQ ID NO: 5998 - protein, 15 aa, synthetic construct
LPLRVPVRAAELGAA

SEQ ID NO: 5999 - protein, 15 aa, synthetic construct
LPQGPDRPRRLRGGL

SEQ ID NO: 6000 - protein, 15 aa, synthetic construct
LPRAGPPRGSSGHPP

SEQ ID NO: 6001 - protein, 15 aa, synthetic construct
LPRAPGPARAQPRPP

SEQ ID NO: 6002 - protein, 15 aa, synthetic construct
LPRAQGWAAVRVPAL

SEQ ID NO: 6003 - protein, 15 aa, synthetic construct
LPRAQPAAARGRVLR

SEQ ID NO: 6004 - protein, 15 aa, synthetic construct
LPREPPWRRPLQLRL

SEQ ID NO: 6005 - protein, 15 aa, synthetic construct
LPRGGLGGRRWAPGA

SEQ ID NO: 6006 - protein, 15 aa, synthetic construct
LPRGRVARAAALAPA

SEQ ID NO: 6007 - protein, 15 aa, synthetic construct
LPRHGAAGHSQEYTS

SEQ ID NO: 6008 - protein, 15 aa, synthetic construct
LPRHRGAERGGPGVR

SEQ ID NO: 6009 - protein, 15 aa, synthetic construct
LPRLPGGRRLRRRLP

SEQ ID NO: 6010 - protein, 15 aa, synthetic construct
LPRLPHPHAAPGRAG

SEQ ID NO: 6011 - protein, 15 aa, synthetic construct
LPRLQGFGAPLGRGA

SEQ ID NO: 6012 - protein, 15 aa, synthetic construct
LPRPALAPAAYCLGP

SEQ ID NO: 6013 - protein, 15 aa, synthetic construct
LPRPLPLRHAGDPRS

SEQ ID NO: 6014 - protein, 15 aa, synthetic construct
LPRQLLGPRAADARS

SEQ ID NO: 6015 - protein, 15 aa, synthetic construct
LPRRGRHPLRPHLPL

SEQ ID NO: 6016 - protein, 15 aa, synthetic construct
LPRRHSPRTRGPSCA

SEQ ID NO: 6017 - protein, 15 aa, synthetic construct
LPRRLPAAGRGRHPL

SEQ ID NO: 6018 - protein, 15 aa, synthetic construct
LPRRLPGLEELGAPQ

SEQ ID NO: 6019 - protein, 15 aa, synthetic construct
LPRRSRSRSHRRRRR

SEQ ID NO: 6020 - protein, 15 aa, synthetic construct
LPRSPAPRPRRSWAE

SEQ ID NO: 6021 - protein, 15 aa, synthetic construct
LPRSPARVADGRRND

SEQ ID NO: 6022 - protein, 15 aa, synthetic construct
LPRVHAHLPGRGELR

SEQ ID NO: 6023 - protein, 15 aa, synthetic construct
LPSAAACPDARPGTG

SEQ ID NO: 6024 - protein, 15 aa, synthetic construct
LPSAGRPALLRLPEH

SEQ ID NO: 6025 - protein, 15 aa, synthetic construct
LPSAPAPGVGRPRRL

SEQ ID NO: 6026 - protein, 15 aa, synthetic construct
LPSGVRAGGRQEGLD

SEQ ID NO: 6027 - protein, 15 aa, synthetic construct
LPSHSTSATATMICL

SEQ ID NO: 6028 - protein, 15 aa, synthetic construct
LPSIHSPCWGMGSSL

SEQ ID NO: 6029 - protein, 15 aa, synthetic construct
LPSLSAPFHLRHTFA

SEQ ID NO: 6030 - protein, 15 aa, synthetic construct
LPSPSLAAFASAGAG

SEQ ID NO: 6031 - protein, 15 aa, synthetic construct
LPSPSLLRDPAPLPE

SEQ ID NO: 6032 - protein, 15 aa, synthetic construct
LPSRGQRAQWRLQQS

SEQ ID NO: 6033 - protein, 15 aa, synthetic construct
LPSRLLPLLGGRGLV

SEQ ID NO: 6034 - protein, 15 aa, synthetic construct
LPSRPSTWASSSWAS

SEQ ID NO: 6035 - protein, 15 aa, synthetic construct
LPSRRARPVLARLPP

SEQ ID NO: 6036 - protein, 15 aa, synthetic construct
LPSVPTSPGAGLRHE

SEQ ID NO: 6037 - protein, 15 aa, synthetic construct
LPTAERGPGGGVGVA

SEQ ID NO: 6038 - protein, 15 aa, synthetic construct
LPTASTMGQAGPRRR

SEQ ID NO: 6039 - protein, 15 aa, synthetic construct
LPTLAGSNTMSPSIT

SEQ ID NO: 6040 - protein, 15 aa, synthetic construct
LPTNLSGSYRSGLSR

SEQ ID NO: 6041 - protein, 15 aa, synthetic construct
LPTSSSSSRTTKATT

SEQ ID NO: 6042 - protein, 15 aa, synthetic construct
LPVRPLRLRDPLHRG

SEQ ID NO: 6043 - protein, 15 aa, synthetic construct
NRPGRPGLGQRRRRD

SEQ ID NO: 6044 - protein, 15 aa, synthetic construct
PGPPQPLSAPNQSHC

SEQ ID NO: 6045 - protein, 15 aa, synthetic construct
PPGTSSFLTCGRRSS

SEQ ID NO: 6046 - protein, 15 aa, synthetic construct
PTLANQPHIPPGCSQ

SEQ ID NO: 6047 - protein, 15 aa, synthetic construct
QGGPLPLQAHRRDHH

SEQ ID NO: 6048 - protein, 15 aa, synthetic construct
QRDKPLPLGPLHHAG

SEQ ID NO: 6049 - protein, 15 aa, synthetic construct
QTQSEKGQEAEGSEV

SEQ ID NO: 6050 - protein, 15 aa, synthetic construct
RPKPSGRATAHRGTC

SEQ ID NO: 6051 - protein, 15 aa, synthetic construct
RSGAATRTSPGRGRS

SEQ ID NO: 6052 - protein, 15 aa, synthetic construct
RTRRRGPLPAVPGAL

SEQ ID NO: 6053 - protein, 15 aa, synthetic construct
SAGGRRRRPRGSRRL

SEQ ID NO: 6054 - protein, 15 aa, synthetic construct
SAIWVRPRQRCCKKD

SEQ ID NO: 6055 - protein, 15 aa, synthetic construct
SAPAGQPRPWRPSRT

SEQ ID NO: 6056 - protein, 15 aa, synthetic construct
SARSFTLSASSPCPW

SEQ ID NO: 6057 - protein, 15 aa, synthetic construct
SSAAGLEPRWSPCAS

SEQ ID NO: 6058 - protein, 15 aa, synthetic construct
SSAGTPSSRAPRGSP

SEQ ID NO: 6059 - protein, 15 aa, synthetic construct
SSSSGGRGGSGGGGR

SEQ ID NO: 6060 - protein, 15 aa, synthetic construct
TPRQYSSGWTPTVTA

SEQ ID NO: 6061 - protein, 15 aa, synthetic construct
TPSLPSSALGRTQNP

SEQ ID NO: 6062 - protein, 15 aa, synthetic construct
VKSFRRETAAAGTEA

SEQ ID NO: 6063 - protein, 15 aa, synthetic construct
VPPLVAAGRALRPPG

SEQ ID NO: 6064 - protein, 15 aa, synthetic construct
WAAEPSCSCFCLFWR

SEQ ID NO: 6065 - protein, 15 aa, synthetic construct
YPRAVGEPGRGARQQ

SEQ ID NO: 6066 - protein, 15 aa, synthetic construct
YPRPPPPPPLPPRLR

SEQ ID NO: 6067 - protein, 15 aa, synthetic construct
YPSPPPYPSPPPYPS

SEQ ID NO: 6068 - protein, 15 aa, synthetic construct
YPSYDVQRNQTEQIG

SEQ ID NO: 6069 - protein, 15 aa, synthetic construct
AAAAPAAAATPGRRQ

SEQ ID NO: 6070 - protein, 15 aa, synthetic construct
AAPAAVCPAAADPSA

SEQ ID NO: 6071 - protein, 15 aa, synthetic construct
AEGQVGGHRPPPRAA

SEQ ID NO: 6072 - protein, 15 aa, synthetic construct
AGAAAGSRGPGLRHL

SEQ ID NO: 6073 - protein, 15 aa, synthetic construct
ALERPGDGAAAGDAA

SEQ ID NO: 6074 - protein, 15 aa, synthetic construct
APGAAGSPLPWRPAP

SEQ ID NO: 6075 - protein, 15 aa, synthetic construct
ARPGAGAGAARGPAA

SEQ ID NO: 6076 - protein, 15 aa, synthetic construct
ASSATGRRRRGRDCC

SEQ ID NO: 6077 - protein, 15 aa, synthetic construct
CPPQTRLTGWAWPGR

SEQ ID NO: 6078 - protein, 15 aa, synthetic construct
CRRSSRGPSAAAAGG

SEQ ID NO: 6079 - protein, 15 aa, synthetic construct
CRSRRCSPPRRRLGS

SEQ ID NO: 6080 - protein, 15 aa, synthetic construct
CSVRGTRTTPISSRR

SEQ ID NO: 6081 - protein, 15 aa, synthetic construct
CTPFTRCSSTSSTAS

SEQ ID NO: 6082 - protein, 15 aa, synthetic construct
EGRSGESRGCRWRRD

SEQ ID NO: 6083 - protein, 15 aa, synthetic construct
ERIHGVGAGGAPQAG

SEQ ID NO: 6084 - protein, 15 aa, synthetic construct
GAASQALGVREPGRC

SEQ ID NO: 6085 - protein, 15 aa, synthetic construct
GAGAGAAGPGLRGAA

SEQ ID NO: 6086 - protein, 15 aa, synthetic construct
GAGGVGDPRGMWRVR

SEQ ID NO: 6087 - protein, 15 aa, synthetic construct
GASESHERGAAATRL

SEQ ID NO: 6088 - protein, 15 aa, synthetic construct
GDAGPSTRTSYAASG

SEQ ID NO: 6089 - protein, 15 aa, synthetic construct
GGGGGSDSSSSSQYS

SEQ ID NO: 6090 - protein, 15 aa, synthetic construct
GGRLGPPGAGAAAAA

SEQ ID NO: 6091 - protein, 15 aa, synthetic construct
GIGGGAAHDHAAVHG

SEQ ID NO: 6092 - protein, 15 aa, synthetic construct
GLQPPGLQLPPEAGA

SEQ ID NO: 6093 - protein, 15 aa, synthetic construct
GLRRRARRRRPPSIC

SEQ ID NO: 6094 - protein, 15 aa, synthetic construct
GPRTLEGPPRAAPRA

SEQ ID NO: 6095 - protein, 15 aa, synthetic construct
GQSQGHHVENFGLDS

SEQ ID NO: 6096 - protein, 15 aa, synthetic construct
GRRRPAAGRPGAPAL

SEQ ID NO: 6097 - protein, 15 aa, synthetic construct
GRRRRRGAPEQRAAA

SEQ ID NO: 6098 - protein, 15 aa, synthetic construct
GSSFHSAPGMGARGT

SEQ ID NO: 6099 - protein, 15 aa, synthetic construct
GSWGAAGGAAGGAGA

SEQ ID NO: 6100 - protein, 15 aa, synthetic construct
GTCRTPLPRCWFRAR

SEQ ID NO: 6101 - protein, 15 aa, synthetic construct
GVCAGAVAGPGAGAG

SEQ ID NO: 6102 - protein, 15 aa, synthetic construct
GWCHSNPFDNQREDL

SEQ ID NO: 6103 - protein, 15 aa, synthetic construct
HSAVAFAARLRDGRR

SEQ ID NO: 6104 - protein, 15 aa, synthetic construct
IITARYGVGAAAAAA

SEQ ID NO: 6105 - protein, 15 aa, synthetic construct
KGSRTSTRTGRRRAC

SEQ ID NO: 6106 - protein, 15 aa, synthetic construct
KVPRAGGPVPAAESL

SEQ ID NO: 6107 - protein, 15 aa, synthetic construct
PALPPLLFKGEEKRA

SEQ ID NO: 6108 - protein, 15 aa, synthetic construct
PAPRALLPLPWPPCV

SEQ ID NO: 6109 - protein, 15 aa, synthetic construct
PGAWQARPWSRCECG

SEQ ID NO: 6110 - protein, 15 aa, synthetic construct
PGLPGAGAPARPSPG

SEQ ID NO: 6111 - protein, 15 aa, synthetic construct
PGTSLVPRPPWNRMV

SEQ ID NO: 6112 - protein, 15 aa, synthetic construct
PHRAGPGAGAGGAGA

SEQ ID NO: 6113 - protein, 15 aa, synthetic construct
PHRAGPGTGAGGAGA

SEQ ID NO: 6114 - protein, 15 aa, synthetic construct
PHRSGPGAGAGGAGA

SEQ ID NO: 6115 - protein, 15 aa, synthetic construct
PPPPRATAVPSRTAP

SEQ ID NO: 6116 - protein, 15 aa, synthetic construct
PPRQDSRRAHRLGGF

SEQ ID NO: 6117 - protein, 15 aa, synthetic construct
PRPGCGAPDPRRRPS

SEQ ID NO: 6118 - protein, 15 aa, synthetic construct
PTTAAPSASVPWPRA

SEQ ID NO: 6119 - protein, 15 aa, synthetic construct
PWRPRRHLGPGGGPG

SEQ ID NO: 6120 - protein, 15 aa, synthetic construct
RAAHRSFTEATTSAH

SEQ ID NO: 6121 - protein, 15 aa, synthetic construct
RATGHRTWKSWGPCV

SEQ ID NO: 6122 - protein, 15 aa, synthetic construct
RCRCSCCCCYARAPA

SEQ ID NO: 6123 - protein, 15 aa, synthetic construct
RGDRSRDLERSREAA

SEQ ID NO: 6124 - protein, 15 aa, synthetic construct
RGPPRRPPARPAALA

SEQ ID NO: 6125 - protein, 15 aa, synthetic construct
RGRAGASCSCCRCRC

SEQ ID NO: 6126 - protein, 15 aa, synthetic construct
RGREVATHHGAQGAG

SEQ ID NO: 6127 - protein, 15 aa, synthetic construct
RGRGRGAGRPRAVRG

SEQ ID NO: 6128 - protein, 15 aa, synthetic construct
RLLRPSDRGGLRRLG

SEQ ID NO: 6129 - protein, 15 aa, synthetic construct
RPVPAPAQRRAQQDA

SEQ ID NO: 6130 - protein, 15 aa, synthetic construct
RRRPGHEAGVGAGAA

SEQ ID NO: 6131 - protein, 15 aa, synthetic construct
RRRRAQSQAACEAAH

SEQ ID NO: 6132 - protein, 15 aa, synthetic construct
RSGCTSWRRTSSTAT

SEQ ID NO: 6133 - protein, 15 aa, synthetic construct
RTSAAGCRSARSSCS

SEQ ID NO: 6134 - protein, 15 aa, synthetic construct
SCSLTWATCWRRTGT

SEQ ID NO: 6135 - protein, 15 aa, synthetic construct
SSASTRTSLRAPSAP

SEQ ID NO: 6136 - protein, 15 aa, synthetic construct
SSTNTASRGRTWCRA

SEQ ID NO: 6137 - protein, 15 aa, synthetic construct
STATAAAWRSCCSTP

SEQ ID NO: 6138 - protein, 15 aa, synthetic construct
TLAPPAPSRTWRRTW

SEQ ID NO: 6139 - protein, 15 aa, synthetic construct
TRQRSCNASRCTRSW

SEQ ID NO: 6140 - protein, 15 aa, synthetic construct
WALEETASWGAGVPC

SEQ ID NO: 6141 - protein, 15 aa, synthetic construct
WANAGAGARASYSTP

SEQ ID NO: 6142 - protein, 15 aa, synthetic construct
WGCKPGAGRPGAGAL

SEQ ID NO: 6143 - protein, 15 aa, synthetic construct
WGCSPWSSATATSTA

SEQ ID NO: 6144 - protein, 15 aa, synthetic construct
WGFLRSGSGAAAGAG

SEQ ID NO: 6145 - protein, 15 aa, synthetic construct
WGSQRSSSATAASIV

SEQ ID NO: 6146 - protein, 15 aa, synthetic construct
WMVSLQPFRQSEGGP

SEQ ID NO: 6147 - protein, 15 aa, synthetic construct
WPTSRSTTRTSTSTN

SEQ ID NO: 6148 - protein, 15 aa, synthetic construct
WRARAWRSCSQRQSR

SEQ ID NO: 6149 - protein, 15 aa, synthetic construct
WRRDLCRALPEESSC

SEQ ID NO: 6150 - protein, 15 aa, synthetic construct
WRRPRRRQQRWVSGS

SEQ ID NO: 6151 - protein, 15 aa, synthetic construct
WRTAVCGCGAGAAAG

SEQ ID NO: 6152 - protein, 15 aa, synthetic construct
WSPAAWSTSAPRCSR

SEQ ID NO: 6153 - protein, 15 aa, synthetic construct
YRPWRGTTRNCSSTS

SEQ ID NO: 6154 - protein, 15 aa, synthetic construct
AAAAWSAPTPRRAEH

SEQ ID NO: 6155 - protein, 15 aa, synthetic construct
AAPVPWRPGRAGAGQ

SEQ ID NO: 6156 - protein, 15 aa, synthetic construct
AGAARGGPGGGALLR

SEQ ID NO: 6157 - protein, 15 aa, synthetic construct
AGGGAGGLAARQAEL

SEQ ID NO: 6158 - protein, 15 aa, synthetic construct
AGRPGARAAGAAAGL

SEQ ID NO: 6159 - protein, 15 aa, synthetic construct
AMCPEELACKPFRGG

SEQ ID NO: 6160 - protein, 15 aa, synthetic construct
ARQQWGGDGGGRGAG

SEQ ID NO: 6161 - protein, 15 aa, synthetic construct
ARRLHLPSDTAALLA

SEQ ID NO: 6162 - protein, 15 aa, synthetic construct
CGAALRPTAWPSSPQ

SEQ ID NO: 6163 - protein, 15 aa, synthetic construct
CGGSAARPRTAPMFC

SEQ ID NO: 6164 - protein, 15 aa, synthetic construct
CILHVWSAPAPSFCY

SEQ ID NO: 6165 - protein, 15 aa, synthetic construct
CPARSASPTAAGAGA

SEQ ID NO: 6166 - protein, 15 aa, synthetic construct
CPRPSPSRSPSPYRT

SEQ ID NO: 6167 - protein, 15 aa, synthetic construct
CPTTWPRLPRPARRW

SEQ ID NO: 6168 - protein, 15 aa, synthetic construct
CRAKWPSSPAGPRAS

SEQ ID NO: 6169 - protein, 15 aa, synthetic construct
CRPRPSLRHPRLPRA

SEQ ID NO: 6170 - protein, 15 aa, synthetic construct
CSPQAGRPPGRRRAA

SEQ ID NO: 6171 - protein, 15 aa, synthetic construct
CSRPRRPPSWCRRSA

SEQ ID NO: 6172 - protein, 15 aa, synthetic construct
CSSLAGPSSETLLAT

SEQ ID NO: 6173 - protein, 15 aa, synthetic construct
CWRRPRRPRAPRGRV

SEQ ID NO: 6174 - protein, 15 aa, synthetic construct
DYTPQKEAAASRRRP

SEQ ID NO: 6175 - protein, 15 aa, synthetic construct
EAAGENEERLVHGRN

SEQ ID NO: 6176 - protein, 15 aa, synthetic construct
EGTWDLPGDFGRTFA

SEQ ID NO: 6177 - protein, 15 aa, synthetic construct
EVQRPLPLPGAACPG

SEQ ID NO: 6178 - protein, 15 aa, synthetic construct
FDSERLRRQKTRPAA

SEQ ID NO: 6179 - protein, 15 aa, synthetic construct
FSRPGVGPLPWLRAL

SEQ ID NO: 6180 - protein, 15 aa, synthetic construct
GAAALGTLCCPSSLG

SEQ ID NO: 6181 - protein, 15 aa, synthetic construct
GAAAPPAAAAALAGV

SEQ ID NO: 6182 - protein, 15 aa, synthetic construct
GAAAPPPGLEGRQRG

SEQ ID NO: 6183 - protein, 15 aa, synthetic construct
GAAPESPGAAARGAA

SEQ ID NO: 6184 - protein, 15 aa, synthetic construct
GAARPGAVRLQVGEP

SEQ ID NO: 6185 - protein, 15 aa, synthetic construct
GAGGREPQRGQRELA

SEQ ID NO: 6186 - protein, 15 aa, synthetic construct
GAISACPWPSAPGHA

SEQ ID NO: 6187 - protein, 15 aa, synthetic construct
GAPAQRLAAAAARRP

SEQ ID NO: 6188 - protein, 15 aa, synthetic construct
GAPELHLGKRLHLGG

SEQ ID NO: 6189 - protein, 15 aa, synthetic construct
GAPGLPGGAGDLRAG

SEQ ID NO: 6190 - protein, 15 aa, synthetic construct
GAPGPRLVAAMCGRS

SEQ ID NO: 6191 - protein, 15 aa, synthetic construct
GAPGPRPGSRRLAPE

SEQ ID NO: 6192 - protein, 15 aa, synthetic construct
GAPHRQPVPAHRAPP

SEQ ID NO: 6193 - protein, 15 aa, synthetic construct
GAPKGAVALVGAPRV

SEQ ID NO: 6194 - protein, 15 aa, synthetic construct
GAPQLPPLPARHHRQ

SEQ ID NO: 6195 - protein, 15 aa, synthetic construct
GAPRAGGGAAAGNAR

SEQ ID NO: 6196 - protein, 15 aa, synthetic construct
GAPREAVAPVGAPRG

SEQ ID NO: 6197 - protein, 15 aa, synthetic construct
GAPRGRRPSGCGQPA

SEQ ID NO: 6198 - protein, 15 aa, synthetic construct
GAPRGSVALVGAARG

SEQ ID NO: 6199 - protein, 15 aa, synthetic construct
GAPRWDGTCGPGPAC

SEQ ID NO: 6200 - protein, 15 aa, synthetic construct
GCSLAHPARESLPQP

SEQ ID NO: 6201 - protein, 15 aa, synthetic construct
GGCGGGSGLREPPEW

SEQ ID NO: 6202 - protein, 15 aa, synthetic construct
GLPRREYLQHDHVVP

SEQ ID NO: 6203 - protein, 15 aa, synthetic construct
GNAGAGGGRMRGCQP

SEQ ID NO: 6204 - protein, 15 aa, synthetic construct
GNEARGHPEGAGEPD

SEQ ID NO: 6205 - protein, 15 aa, synthetic construct
GPLGPGAVPTAPGQA

SEQ ID NO: 6206 - protein, 15 aa, synthetic construct
GQVQRALHAGRLLLP

SEQ ID NO: 6207 - protein, 15 aa, synthetic construct
GRDRHRRPPASRIAA

SEQ ID NO: 6208 - protein, 15 aa, synthetic construct
GSGGGRGCRRGSAVP

SEQ ID NO: 6209 - protein, 15 aa, synthetic construct
GTARTWSRPHCARPS

SEQ ID NO: 6210 - protein, 15 aa, synthetic construct
GTPVAPGYLGPLWAA

SEQ ID NO: 6211 - protein, 15 aa, synthetic construct
GWNRTEPRALCSCDF

SEQ ID NO: 6212 - protein, 15 aa, synthetic construct
GWPRASGCSQCWVCC

SEQ ID NO: 6213 - protein, 15 aa, synthetic construct
HQLGTPLFPLLYPPS

SEQ ID NO: 6214 - protein, 15 aa, synthetic construct
IDTLKVLHMIRKQLW

SEQ ID NO: 6215 - protein, 15 aa, synthetic construct
KKSPEQPLTLSTRPM

SEQ ID NO: 6216 - protein, 15 aa, synthetic construct
LFATWPSAPRRRPGG

SEQ ID NO: 6217 - protein, 15 aa, synthetic construct
LGEPGGRWPSAPPAT

SEQ ID NO: 6218 - protein, 15 aa, synthetic construct
LGLQPGVRARRSGPG

SEQ ID NO: 6219 - protein, 15 aa, synthetic construct
LSRCPAMTASQARAA

SEQ ID NO: 6220 - protein, 15 aa, synthetic construct
PARAAGGSGRLAPAD

SEQ ID NO: 6221 - protein, 15 aa, synthetic construct
PDTLAAQPHGRGGAR

SEQ ID NO: 6222 - protein, 15 aa, synthetic construct
PRAARPRRARGCGPR

SEQ ID NO: 6223 - protein, 15 aa, synthetic construct
PRAGTRPGLGLGARA

SEQ ID NO: 6224 - protein, 15 aa, synthetic construct
PRGRPTPAPQGRPGS

SEQ ID NO: 6225 - protein, 15 aa, synthetic construct
PTPMPPASTTWRSTR

SEQ ID NO: 6226 - protein, 15 aa, synthetic construct
QPSSERRRRSASRTR

SEQ ID NO: 6227 - protein, 15 aa, synthetic construct
QVRAALVTGLGAGVG

SEQ ID NO: 6228 - protein, 15 aa, synthetic construct
REPGPPQRRCRRASR

SEQ ID NO: 6229 - protein, 15 aa, synthetic construct
RLRTRGLLGGPSPCA

SEQ ID NO: 6230 - protein, 15 aa, synthetic construct
RMAAGSAIDSARGEG

SEQ ID NO: 6231 - protein, 15 aa, synthetic construct
RMLPRGGQDVLPRGD

SEQ ID NO: 6232 - protein, 15 aa, synthetic construct
RPARRQVAGHRAPRL

SEQ ID NO: 6233 - protein, 15 aa, synthetic construct
RPPRGVDSEARSHSL

SEQ ID NO: 6234 - protein, 15 aa, synthetic construct
RPQKAPGLRPRARRE

SEQ ID NO: 6235 - protein, 15 aa, synthetic construct
RPRPSWPSTWTPRPN

SEQ ID NO: 6236 - protein, 15 aa, synthetic construct
RRAPATRRADLGRSG

SEQ ID NO: 6237 - protein, 15 aa, synthetic construct
RRPSARGPHPMLRAP

SEQ ID NO: 6238 - protein, 15 aa, synthetic construct
RRTTTTRTAAVATTA

SEQ ID NO: 6239 - protein, 15 aa, synthetic construct
RRWPSAPSTTSAQAG

SEQ ID NO: 6240 - protein, 15 aa, synthetic construct
RSRPAGAPGRQRRLF

SEQ ID NO: 6241 - protein, 15 aa, synthetic construct
RSRPGPFSRPSVVKQ

SEQ ID NO: 6242 - protein, 15 aa, synthetic construct
SGMRLLPLRLASCRA

SEQ ID NO: 6243 - protein, 15 aa, synthetic construct
SPSRSPSPRRSRNRS

SEQ ID NO: 6244 - protein, 15 aa, synthetic construct
SQHRSLLRGDPDEAR

SEQ ID NO: 6245 - protein, 15 aa, synthetic construct
TLASQASGTATTVGS

SEQ ID NO: 6246 - protein, 15 aa, synthetic construct
TLDLRLEERELNAVL

SEQ ID NO: 6247 - protein, 15 aa, synthetic construct
TLPLLHGPVSVRRWE

SEQ ID NO: 6248 - protein, 15 aa, synthetic construct
TLPPGKAASSISMTT

SEQ ID NO: 6249 - protein, 15 aa, synthetic construct
TLPPPPLSTWRGATR

SEQ ID NO: 6250 - protein, 15 aa, synthetic construct
TLPTRPPATARAGQP

SEQ ID NO: 6251 - protein, 15 aa, synthetic construct
TSRTMTRQTMTSSHR

SEQ ID NO: 6252 - protein, 15 aa, synthetic construct
TSRWSSGPRTSSPRP

SEQ ID NO: 6253 - protein, 15 aa, synthetic construct
WGTRRRPTTATPGDL

SEQ ID NO: 6254 - protein, 15 aa, synthetic construct
WPMGARAKTRSSSCE

SEQ ID NO: 6255 - protein, 15 aa, synthetic construct
WRPRGARHRGCSSCC

SEQ ID NO: 6256 - protein, 15 aa, synthetic construct
WSAPRRRAGSRFRCC

SEQ ID NO: 6257 - protein, 15 aa, synthetic construct
WSRGPRRPPPAPRDW

SEQ ID NO: 6258 - protein, 15 aa, synthetic construct
WSRGSSRTSSGGGRE

SEQ ID NO: 6259 - protein, 15 aa, synthetic construct
AAGAAGGPVAEDGCG

SEQ ID NO: 6260 - protein, 15 aa, synthetic construct
AALRGERLLTARHEL

SEQ ID NO: 6261 - protein, 15 aa, synthetic construct
AARQRGLLPPQLQRR

SEQ ID NO: 6262 - protein, 15 aa, synthetic construct
ACGPSHSRHCLPAGL

SEQ ID NO: 6263 - protein, 15 aa, synthetic construct
ASRRPTVSPASTDSS

SEQ ID NO: 6264 - protein, 15 aa, synthetic construct
GAALGSCGRPLALAP

SEQ ID NO: 6265 - protein, 15 aa, synthetic construct
GACQRVGETATGEPA

SEQ ID NO: 6266 - protein, 15 aa, synthetic construct
GALQRLPPGAPRGRV

SEQ ID NO: 6267 - protein, 15 aa, synthetic construct
GAYEADCSQVHRRQG

SEQ ID NO: 6268 - protein, 15 aa, synthetic construct
GELEGGAAQSHLARL

SEQ ID NO: 6269 - protein, 15 aa, synthetic construct
GGALEAMAHGAASRA

SEQ ID NO: 6270 - protein, 15 aa, synthetic construct
GGPRATGAESPAGRA

SEQ ID NO: 6271 - protein, 15 aa, synthetic construct
LRAPAARPGPGGLRG

SEQ ID NO: 6272 - protein, 15 aa, synthetic construct
QGAGAAPRGARPLQP

SEQ ID NO: 6273 - protein, 15 aa, synthetic construct
RPGAGARANVGPASV

SEQ ID NO: 6274 - protein, 15 aa, synthetic construct
RQPRPPTRTETPAWA

SEQ ID NO: 6275 - protein, 15 aa, synthetic construct
SGPEAPPRGERRRVP

SEQ ID NO: 6276 - protein, 15 aa, synthetic construct
SRRCSALRLRTRMSG

SEQ ID NO: 6277 - protein, 15 aa, synthetic construct
TVGSHSGGLGRMGRP

SEQ ID NO: 6278 - protein, 15 aa, synthetic construct
VGMRRPRRRQQQQRG

SEQ ID NO: 6279 - protein, 15 aa, synthetic construct
AAVFQPVPALAVASG

SEQ ID NO: 6280 - protein, 15 aa, synthetic construct
APKEAKPPAAREMRG

SEQ ID NO: 6281 - protein, 15 aa, synthetic construct
APPRPPRRRPGVPGP

SEQ ID NO: 6282 - protein, 15 aa, synthetic construct
ARGRGGAGAAAAGGA

SEQ ID NO: 6283 - protein, 15 aa, synthetic construct
CATAPRGRPRPPAQL

SEQ ID NO: 6284 - protein, 15 aa, synthetic construct
EEPRRPRVAHLGARG

SEQ ID NO: 6285 - protein, 15 aa, synthetic construct
EEPVLRPTPAPLAAA

SEQ ID NO: 6286 - protein, 15 aa, synthetic construct
ESPAICYLRCFLGRD

SEQ ID NO: 6287 - protein, 15 aa, synthetic construct
GAGAPGGRGAASAAV

SEQ ID NO: 6288 - protein, 15 aa, synthetic construct
GFSPGAGAGILALPA

SEQ ID NO: 6289 - protein, 15 aa, synthetic construct
GGAEGGGRGRDPGAR

SEQ ID NO: 6290 - protein, 15 aa, synthetic construct
GGAGRVGPRGGAGPR

SEQ ID NO: 6291 - protein, 15 aa, synthetic construct
GHLHGPAAAAAAAPD

SEQ ID NO: 6292 - protein, 15 aa, synthetic construct
GPGPRGRGRRGTARA

SEQ ID NO: 6293 - protein, 15 aa, synthetic construct
GPRGLPPLQRENFPG

SEQ ID NO: 6294 - protein, 15 aa, synthetic construct
GQESSAGSETVATGP

SEQ ID NO: 6295 - protein, 15 aa, synthetic construct
GRRGSETRLLVSSAA

SEQ ID NO: 6296 - protein, 15 aa, synthetic construct
GRSPRGGQRPTEGRA

SEQ ID NO: 6297 - protein, 15 aa, synthetic construct
LLALRHAQEAAGPAR

SEQ ID NO: 6298 - protein, 15 aa, synthetic construct
LSLSRPHGRSSRQPR

SEQ ID NO: 6299 - protein, 15 aa, synthetic construct
PRGGAPSPPPPGSAR

SEQ ID NO: 6300 - protein, 15 aa, synthetic construct
PRGSRPPSAAPRGAR

SEQ ID NO: 6301 - protein, 15 aa, synthetic construct
QLATFSEFPGTRAAN

SEQ ID NO: 6302 - protein, 15 aa, synthetic construct
RAPRGLPRRPGWGRR

SEQ ID NO: 6303 - protein, 15 aa, synthetic construct
RCRPDPSFSRRLKRK

SEQ ID NO: 6304 - protein, 15 aa, synthetic construct
RPGAAQPPGVPVLLR

SEQ ID NO: 6305 - protein, 15 aa, synthetic construct
RPPDRAAARSQRKTK

SEQ ID NO: 6306 - protein, 15 aa, synthetic construct
RTGGAARAARPGLRP

SEQ ID NO: 6307 - protein, 15 aa, synthetic construct
SGAGAGWLQPGREPP

SEQ ID NO: 6308 - protein, 15 aa, synthetic construct
SPYPRLQLPWAVSLL

SEQ ID NO: 6309 - protein, 15 aa, synthetic construct
VKTALGLQMLVPSLL

SEQ ID NO: 6310 - protein, 15 aa, synthetic construct
WRTAAPRGARRWRPR

SEQ ID NO: 6311 - protein, 15 aa, synthetic construct
WTPAAGPGLGRRAPR

SEQ ID NO: 6312 - protein, 15 aa, synthetic construct
WTPRAVQQPILLQPH

SEQ ID NO: 6313 - protein, 15 aa, synthetic construct
AARRPPGPRRAAGPL

SEQ ID NO: 6314 - protein, 15 aa, synthetic construct
ADAGAGAGPGAGPAG

SEQ ID NO: 6315 - protein, 15 aa, synthetic construct
ADRGPGGAPGASVPA

SEQ ID NO: 6316 - protein, 15 aa, synthetic construct
AEGRVEDAEFDSDPG

SEQ ID NO: 6317 - protein, 15 aa, synthetic construct
AGAGAAAGAPGRPRS

SEQ ID NO: 6318 - protein, 15 aa, synthetic construct
AGDAAGAPGAGAGCL

SEQ ID NO: 6319 - protein, 15 aa, synthetic construct
AGGGARPALRRRPLA

SEQ ID NO: 6320 - protein, 15 aa, synthetic construct
ARSGAGGCARPQGAA

SEQ ID NO: 6321 - protein, 15 aa, synthetic construct
ASAGAGGAGPKLRPG

SEQ ID NO: 6322 - protein, 15 aa, synthetic construct
CCASCSPWAWPWSVV

SEQ ID NO: 6323 - protein, 15 aa, synthetic construct
CEACREPALPPRGPQ

SEQ ID NO: 6324 - protein, 15 aa, synthetic construct
DPRGPRGAAPERAAR

SEQ ID NO: 6325 - protein, 15 aa, synthetic construct
DRPEDALLLFLPQPR

SEQ ID NO: 6326 - protein, 15 aa, synthetic construct
DTWHRGNCPAWKVWA

SEQ ID NO: 6327 - protein, 15 aa, synthetic construct
EAGGAGGAAASALAR

SEQ ID NO: 6328 - protein, 15 aa, synthetic construct
ERSRRGRGVRGEPGH

SEQ ID NO: 6329 - protein, 15 aa, synthetic construct
FAPAAAAGCAAGGGG

SEQ ID NO: 6330 - protein, 15 aa, synthetic construct
GAASIAADGAPRGPG

SEQ ID NO: 6331 - protein, 15 aa, synthetic construct
GAGAGARGEAGRWAE

SEQ ID NO: 6332 - protein, 15 aa, synthetic construct
GDRGAASRRHSGARR

SEQ ID NO: 6333 - protein, 15 aa, synthetic construct
GEGAGAGAGGEGGGR

SEQ ID NO: 6334 - protein, 15 aa, synthetic construct
GGAGAGAERSCGDEG

SEQ ID NO: 6335 - protein, 15 aa, synthetic construct
GGAGAGGEVGWRREP

SEQ ID NO: 6336 - protein, 15 aa, synthetic construct
GGARLGAAVPGRPLG

SEQ ID NO: 6337 - protein, 15 aa, synthetic construct
GGARRFRADPRLQRP

SEQ ID NO: 6338 - protein, 15 aa, synthetic construct
GGARRLPASPSGTSG

SEQ ID NO: 6339 - protein, 15 aa, synthetic construct
GGARSGVRADPSEVY

SEQ ID NO: 6340 - protein, 15 aa, synthetic construct
GGARTAASSRETALL

SEQ ID NO: 6341 - protein, 15 aa, synthetic construct
GGGARAAAAPGDRLR

SEQ ID NO: 6342 - protein, 15 aa, synthetic construct
GGGARPMASREAELP

SEQ ID NO: 6343 - protein, 15 aa, synthetic construct
GGPQGPRDGAPPASP

SEQ ID NO: 6344 - protein, 15 aa, synthetic construct
GGSRGGGARPRPQPR

SEQ ID NO: 6345 - protein, 15 aa, synthetic construct
GHFCGFPDGVVWKCC

SEQ ID NO: 6346 - protein, 15 aa, synthetic construct
GLGLLPAGRAHPAAR

SEQ ID NO: 6347 - protein, 15 aa, synthetic construct
GPGAGAAGGAAGRAG

SEQ ID NO: 6348 - protein, 15 aa, synthetic construct
GPQLLQSWWRPNGRS

SEQ ID NO: 6349 - protein, 15 aa, synthetic construct
GRDQCPAHWLRGARG

SEQ ID NO: 6350 - protein, 15 aa, synthetic construct
GWPHTPVPAKPGAGH

SEQ ID NO: 6351 - protein, 15 aa, synthetic construct
IALSSLPARWRAEPG

SEQ ID NO: 6352 - protein, 15 aa, synthetic construct
LQRSPARLRGSHDSR

SEQ ID NO: 6353 - protein, 15 aa, synthetic construct
LTSSPRSLGGRERSA

SEQ ID NO: 6354 - protein, 15 aa, synthetic construct
NSVSTQAKDTLFCVL

SEQ ID NO: 6355 - protein, 15 aa, synthetic construct
PGAGAGEPGGHRAAD

SEQ ID NO: 6356 - protein, 15 aa, synthetic construct
PGLALAAARGPKVPP

SEQ ID NO: 6357 - protein, 15 aa, synthetic construct
PRGGHGPRGGRAAPQ

SEQ ID NO: 6358 - protein, 15 aa, synthetic construct
PRGSGAGAAAGAPPG

SEQ ID NO: 6359 - protein, 15 aa, synthetic construct
PRLGPPRSPPHTSSR

SEQ ID NO: 6360 - protein, 15 aa, synthetic construct
PSPATTTAAATAAAA

SEQ ID NO: 6361 - protein, 15 aa, synthetic construct
QGPAGPGHAKPDGGD

SEQ ID NO: 6362 - protein, 15 aa, synthetic construct
RAGRRRTPHCRPCWL

SEQ ID NO: 6363 - protein, 15 aa, synthetic construct
RAWGAGAGAGAARLR

SEQ ID NO: 6364 - protein, 15 aa, synthetic construct
RGFGAAGAGRGLGGR

SEQ ID NO: 6365 - protein, 15 aa, synthetic construct
RGGAGAAARGQRAAA

SEQ ID NO: 6366 - protein, 15 aa, synthetic construct
RGGAGLGALHPLEDL

SEQ ID NO: 6367 - protein, 15 aa, synthetic construct
RGGARAPASTYCEFR

SEQ ID NO: 6368 - protein, 15 aa, synthetic construct
RLAHRLPVSRALRRR

SEQ ID NO: 6369 - protein, 15 aa, synthetic construct
RPGPASGWTGAPCCA

SEQ ID NO: 6370 - protein, 15 aa, synthetic construct
RRHHLLRQLRVALLL

SEQ ID NO: 6371 - protein, 15 aa, synthetic construct
RSWAVASSFVSSTRR

SEQ ID NO: 6372 - protein, 15 aa, synthetic construct
SPRRPPRPRRLPLIT

SEQ ID NO: 6373 - protein, 15 aa, synthetic construct
SRPWTSPRPSRTWSS

SEQ ID NO: 6374 - protein, 15 aa, synthetic construct
SSSANCPSWTSCSSA

SEQ ID NO: 6375 - protein, 15 aa, synthetic construct
SSSWDSSDDPNIQLY

SEQ ID NO: 6376 - protein, 15 aa, synthetic construct
SWSSSSLPTSGRIRT

SEQ ID NO: 6377 - protein, 15 aa, synthetic construct
VFCSVPGTSVCHVPA

SEQ ID NO: 6378 - protein, 15 aa, synthetic construct
VGPRGAPWTPGRSPP

SEQ ID NO: 6379 - protein, 15 aa, synthetic construct
VRRGRGAGAGVRVRA

SEQ ID NO: 6380 - protein, 15 aa, synthetic construct
VRRQGGPRGAPRGQT

SEQ ID NO: 6381 - protein, 15 aa, synthetic construct
VVWSPTGRKAAAAAA

SEQ ID NO: 6382 - protein, 15 aa, synthetic construct
WGPSQPLPAHSTSPG

SEQ ID NO: 6383 - protein, 15 aa, synthetic construct
WPRGPRKPEATLPGR

SEQ ID NO: 6384 - protein, 15 aa, synthetic construct
WPTAPAVLVATQRPE

SEQ ID NO: 6385 - protein, 15 aa, synthetic construct
WPTSPGWPTTLEGWI

SEQ ID NO: 6386 - protein, 15 aa, synthetic construct
WRGAGAAAAAHPHQP

SEQ ID NO: 6387 - protein, 15 aa, synthetic construct
WTTSPGWPATLDGRI

SEQ ID NO: 6388 - protein, 15 aa, synthetic construct
AAPGEHVPQGRARSE

SEQ ID NO: 6389 - protein, 15 aa, synthetic construct
AGRGAGGLGARGAAV

SEQ ID NO: 6390 - protein, 15 aa, synthetic construct
AKHQLSSPFQVSTWP

SEQ ID NO: 6391 - protein, 15 aa, synthetic construct
APGGAGSPPAAGADD

SEQ ID NO: 6392 - protein, 15 aa, synthetic construct
APSSGTTRPRWPPAS

SEQ ID NO: 6393 - protein, 15 aa, synthetic construct
EAADQSPQPGARPAE

SEQ ID NO: 6394 - protein, 15 aa, synthetic construct
EAAMGRPCLRPVRGG

SEQ ID NO: 6395 - protein, 15 aa, synthetic construct
GAAAGGAHPRRPGHH

SEQ ID NO: 6396 - protein, 15 aa, synthetic construct
GCAGIPEKTSGLPQL

SEQ ID NO: 6397 - protein, 15 aa, synthetic construct
GPCPRASGGAAAGGA

SEQ ID NO: 6398 - protein, 15 aa, synthetic construct
GRSVGGSRAPGPAER

SEQ ID NO: 6399 - protein, 15 aa, synthetic construct
GSVHIHLEEEDGAED

SEQ ID NO: 6400 - protein, 15 aa, synthetic construct
PGRAGSPTPGDPTAV

SEQ ID NO: 6401 - protein, 15 aa, synthetic construct
PRPGLRGRRRSGRHG

SEQ ID NO: 6402 - protein, 15 aa, synthetic construct
PRPGLSPAAGVRRAG

SEQ ID NO: 6403 - protein, 15 aa, synthetic construct
RSPARSFHARGRDPR

SEQ ID NO: 6404 - protein, 15 aa, synthetic construct
SPTAASPAAVSPAAP

SEQ ID NO: 6405 - protein, 15 aa, synthetic construct
VPAGGRRRVLHDRLR

SEQ ID NO: 6406 - protein, 15 aa, synthetic construct
VRAGGGRCVAAQRAD

SEQ ID NO: 6407 - protein, 15 aa, synthetic construct
VRGLRAAAAGRRSPG

SEQ ID NO: 6408 - protein, 15 aa, synthetic construct
WAASGTVRPRTSATR

SEQ ID NO: 6409 - protein, 15 aa, synthetic construct
WPCCSCCSWASWGSG

SEQ ID NO: 6410 - protein, 15 aa, synthetic construct
AAAAASPVTGKPRPG

SEQ ID NO: 6411 - protein, 15 aa, synthetic construct
AAAAPRTPGPGGARL

SEQ ID NO: 6412 - protein, 15 aa, synthetic construct
AAPQRAPGRQDAEPG

SEQ ID NO: 6413 - protein, 15 aa, synthetic construct
AAQADPARAPSGSGR

SEQ ID NO: 6414 - protein, 15 aa, synthetic construct
AEAGAAAVPAAASPA

SEQ ID NO: 6415 - protein, 15 aa, synthetic construct
APRGRLTRDPGATPA

SEQ ID NO: 6416 - protein, 15 aa, synthetic construct
AQEAARGAPAHCRRG

SEQ ID NO: 6417 - protein, 15 aa, synthetic construct
ARQPGARARGAAAST

SEQ ID NO: 6418 - protein, 15 aa, synthetic construct
ARRAAARPAPAAAAA

SEQ ID NO: 6419 - protein, 15 aa, synthetic construct
CHLRHAQAQRHPDGS

SEQ ID NO: 6420 - protein, 15 aa, synthetic construct
CHPQARQTYLSYSPI

SEQ ID NO: 6421 - protein, 15 aa, synthetic construct
CLTPCCPPASSAYWP

SEQ ID NO: 6422 - protein, 15 aa, synthetic construct
CPLKFWDFYAAGLPS

SEQ ID NO: 6423 - protein, 15 aa, synthetic construct
CPWTRACMRAPTATQ

SEQ ID NO: 6424 - protein, 15 aa, synthetic construct
CSPAASARPAGRRAR

SEQ ID NO: 6425 - protein, 15 aa, synthetic construct
CTQPGLPGYPRAGQA

SEQ ID NO: 6426 - protein, 15 aa, synthetic construct
DLRLLHPELPPGRQE

SEQ ID NO: 6427 - protein, 15 aa, synthetic construct
DPAGRGAAELQQRAG

SEQ ID NO: 6428 - protein, 15 aa, synthetic construct
DPVERRTAFLPPAPA

SEQ ID NO: 6429 - protein, 15 aa, synthetic construct
EDQGVQLSKTKASPV

SEQ ID NO: 6430 - protein, 15 aa, synthetic construct
EGQRAPLDRASPAGG

SEQ ID NO: 6431 - protein, 15 aa, synthetic construct
EHHAPADARPAVLLL

SEQ ID NO: 6432 - protein, 15 aa, synthetic construct
EQPQDGEQETGALQP

SEQ ID NO: 6433 - protein, 15 aa, synthetic construct
EVWLRRRVPDLAVGA

SEQ ID NO: 6434 - protein, 15 aa, synthetic construct
GACASRGPRRAAPPQ

SEQ ID NO: 6435 - protein, 15 aa, synthetic construct
GAEHAEARADVPRGR

SEQ ID NO: 6436 - protein, 15 aa, synthetic construct
GEPRDTHSADKASPA

SEQ ID NO: 6437 - protein, 15 aa, synthetic construct
GEQSPARADSGRVAP

SEQ ID NO: 6438 - protein, 15 aa, synthetic construct
GFSAAATAAPRSPRP

SEQ ID NO: 6439 - protein, 15 aa, synthetic construct
GGGLAQVGAPALGRA

SEQ ID NO: 6440 - protein, 15 aa, synthetic construct
GGRQRQLQLQQQWRR

SEQ ID NO: 6441 - protein, 15 aa, synthetic construct
GHPDLHPYLLHWVYQ

SEQ ID NO: 6442 - protein, 15 aa, synthetic construct
GLVAGPLPRLGEAER

SEQ ID NO: 6443 - protein, 15 aa, synthetic construct
GRCAPRGPESELTDS

SEQ ID NO: 6444 - protein, 15 aa, synthetic construct
GVARLPVALGCGSPA

SEQ ID NO: 6445 - protein, 15 aa, synthetic construct
GVSEVLLHEFLLPPV

SEQ ID NO: 6446 - protein, 15 aa, synthetic construct
HGPALLGRCSIWTRR

SEQ ID NO: 6447 - protein, 15 aa, synthetic construct
KRSRKGLKLQASGLS

SEQ ID NO: 6448 - protein, 15 aa, synthetic construct
LCTRPLAQPQHAALG

SEQ ID NO: 6449 - protein, 15 aa, synthetic construct
LHQLSTRTATAAPAA

SEQ ID NO: 6450 - protein, 15 aa, synthetic construct
LRHPPEARGPVTGAD

SEQ ID NO: 6451 - protein, 15 aa, synthetic construct
MDLRFSGAAASGPAG

SEQ ID NO: 6452 - protein, 15 aa, synthetic construct
PGLPAGQGTTYRECG

SEQ ID NO: 6453 - protein, 15 aa, synthetic construct
PLATAASGKFTDRGD

SEQ ID NO: 6454 - protein, 15 aa, synthetic construct
PVSLRRALALADEWR

SEQ ID NO: 6455 - protein, 15 aa, synthetic construct
PWRTQVAPQHPAPVP

SEQ ID NO: 6456 - protein, 15 aa, synthetic construct
QGSRDRGVRLYHPPH

SEQ ID NO: 6457 - protein, 15 aa, synthetic construct
RGHRRAGSRAAAATG

SEQ ID NO: 6458 - protein, 15 aa, synthetic construct
RGSLATETSDAAATR

SEQ ID NO: 6459 - protein, 15 aa, synthetic construct
RHALGPKQTSRRRSG

SEQ ID NO: 6460 - protein, 15 aa, synthetic construct
RLLGRLPRRAPPQQV

SEQ ID NO: 6461 - protein, 15 aa, synthetic construct
RRGPAGAQTAAAAAA

SEQ ID NO: 6462 - protein, 15 aa, synthetic construct
RRPCRVRPQDRQHWR

SEQ ID NO: 6463 - protein, 15 aa, synthetic construct
RRPSRPSSSDERTSS

SEQ ID NO: 6464 - protein, 15 aa, synthetic construct
RRRSVRPTKRSRSSC

SEQ ID NO: 6465 - protein, 15 aa, synthetic construct
SAQCYRGAPPGSDRC

SEQ ID NO: 6466 - protein, 15 aa, synthetic construct
SCGCPVRRRVTATLS

SEQ ID NO: 6467 - protein, 15 aa, synthetic construct
SRLLRWPPLPRDVQW

SEQ ID NO: 6468 - protein, 15 aa, synthetic construct
SRRPPGSRPVHQTRQ

SEQ ID NO: 6469 - protein, 15 aa, synthetic construct
STAARGPGPRRRRLH

SEQ ID NO: 6470 - protein, 15 aa, synthetic construct
TPAGGAHPSGSTAAV

SEQ ID NO: 6471 - protein, 15 aa, synthetic construct
VILRHARLTCPTHRF

SEQ ID NO: 6472 - protein, 15 aa, synthetic construct
VLFRLQDPDCGPLHP

SEQ ID NO: 6473 - protein, 15 aa, synthetic construct
VPGGTMKPGQEARLR

SEQ ID NO: 6474 - protein, 15 aa, synthetic construct
WARAGRSASSDLSSP

SEQ ID NO: 6475 - protein, 15 aa, synthetic construct
WPAPASLAVCSASWR

SEQ ID NO: 6476 - protein, 15 aa, synthetic construct
WPLPRLWRRRRLWVP

SEQ ID NO: 6477 - protein, 15 aa, synthetic construct
WPLRAQRPRVGAHRL

SEQ ID NO: 6478 - protein, 15 aa, synthetic construct
WPQALLADVTGRRLS

SEQ ID NO: 6479 - protein, 15 aa, synthetic construct
WRRPAACGSWLWLSC

SEQ ID NO: 6480 - protein, 15 aa, synthetic construct
WSGWCQMTRTSWTPR

SEQ ID NO: 6481 - protein, 15 aa, synthetic construct
WSRSARARRPAWRAR

SEQ ID NO: 6482 - protein, 15 aa, synthetic construct
WTAALPPRTPAIALM

SEQ ID NO: 6483 - protein, 15 aa, synthetic construct
WTPTAPAPLEAPTPA

SEQ ID NO: 6484 - protein, 15 aa, synthetic construct
WTVAPGAPRPPRSPG

SEQ ID NO: 6485 - protein, 15 aa, synthetic construct
AATAGLGGLGRYEPH

SEQ ID NO: 6486 - protein, 15 aa, synthetic construct
ADRDRALPRGGVPPA

SEQ ID NO: 6487 - protein, 15 aa, synthetic construct
AGAGDGAGGPVCPCA

SEQ ID NO: 6488 - protein, 15 aa, synthetic construct
ATAGASAGAWPRWAA

SEQ ID NO: 6489 - protein, 15 aa, synthetic construct
CCFCQAPRTAGAPPS

SEQ ID NO: 6490 - protein, 15 aa, synthetic construct
CDSPKPSSTWTWPTT

SEQ ID NO: 6491 - protein, 15 aa, synthetic construct
CRSPRKESLSRGAAA

SEQ ID NO: 6492 - protein, 15 aa, synthetic construct
CTIRSRRRRRRPSRR

SEQ ID NO: 6493 - protein, 15 aa, synthetic construct
EGGAAGAPALSAAQR

SEQ ID NO: 6494 - protein, 15 aa, synthetic construct
GAEEGASAADRGAGP

SEQ ID NO: 6495 - protein, 15 aa, synthetic construct
GARGGHEAAPAAAAR

SEQ ID NO: 6496 - protein, 15 aa, synthetic construct
GEPACEVAGPARPPT

SEQ ID NO: 6497 - protein, 15 aa, synthetic construct
LAAERRPPRPRPARG

SEQ ID NO: 6498 - protein, 15 aa, synthetic construct
LPAFRVSAAAAARGF

SEQ ID NO: 6499 - protein, 15 aa, synthetic construct
LRAEGRQDSERCGRG

SEQ ID NO: 6500 - protein, 15 aa, synthetic construct
LRARLRSRRGRYLRP

SEQ ID NO: 6501 - protein, 15 aa, synthetic construct
LRATVRPRRLRRRMG

SEQ ID NO: 6502 - protein, 15 aa, synthetic construct
LRPTSRRSRRHRRRR

SEQ ID NO: 6503 - protein, 15 aa, synthetic construct
LRSQPRGRRCGPGGP

SEQ ID NO: 6504 - protein, 15 aa, synthetic construct
PEGKAGQAGHRRSPA

SEQ ID NO: 6505 - protein, 15 aa, synthetic construct
PESPAQRGRLAPLAG

SEQ ID NO: 6506 - protein, 15 aa, synthetic construct
QEATRPQPRAGRPGD

SEQ ID NO: 6507 - protein, 15 aa, synthetic construct
RLSPSRRKRRRWLLH

SEQ ID NO: 6508 - protein, 15 aa, synthetic construct
RPSARRPSRRPPWTW

SEQ ID NO: 6509 - protein, 15 aa, synthetic construct
RPSCRRPGLRPELLP

SEQ ID NO: 6510 - protein, 15 aa, synthetic construct
RPSRRRAGPSARVAA

SEQ ID NO: 6511 - protein, 15 aa, synthetic construct
RRAPRRRARRVLQRL

SEQ ID NO: 6512 - protein, 15 aa, synthetic construct
RRARRRRLAPAPALA

SEQ ID NO: 6513 - protein, 15 aa, synthetic construct
RRAVRRKERLLHRQL

SEQ ID NO: 6514 - protein, 15 aa, synthetic construct
RRPQPRSRRGGAPRP

SEQ ID NO: 6515 - protein, 15 aa, synthetic construct
SSTRLVRLLRPDPVL

SEQ ID NO: 6516 - protein, 15 aa, synthetic construct
WLRAKRKAGRAQPRA

SEQ ID NO: 6517 - protein, 15 aa, synthetic construct
WPPGAGGGRRPRRCW

SEQ ID NO: 6518 - protein, 15 aa, synthetic construct
WRAPGRGRGAGAGGR

SEQ ID NO: 6519 - protein, 15 aa, synthetic construct
WRSPRRTLPWRRFWG

SEQ ID NO: 6520 - protein, 15 aa, synthetic construct
WRSRRRRRRPCRART

SEQ ID NO: 6521 - protein, 15 aa, synthetic construct
APPALVAEVAGPAGA

SEQ ID NO: 6522 - protein, 15 aa, synthetic construct
CRRARPRACSCPGPW

SEQ ID NO: 6523 - protein, 15 aa, synthetic construct
CRTSPTSRSPRRSQR

SEQ ID NO: 6524 - protein, 15 aa, synthetic construct
DSLTSRPCRAPCSGW

SEQ ID NO: 6525 - protein, 15 aa, synthetic construct
GCTELAGRAGPAGRG

SEQ ID NO: 6526 - protein, 15 aa, synthetic construct
GLRLLHGHPAGLLPG

SEQ ID NO: 6527 - protein, 15 aa, synthetic construct
GRARGAAAGAAAGSG

SEQ ID NO: 6528 - protein, 15 aa, synthetic construct
GRGTAPTAGPWARAW

SEQ ID NO: 6529 - protein, 15 aa, synthetic construct
GVEPWELAGWLPAGV

SEQ ID NO: 6530 - protein, 15 aa, synthetic construct
HPRRLRGRLAPSGQR

SEQ ID NO: 6531 - protein, 15 aa, synthetic construct
LLGCGRPAAEASRAS

SEQ ID NO: 6532 - protein, 15 aa, synthetic construct
PCPSAGRPPLWSLPG

SEQ ID NO: 6533 - protein, 15 aa, synthetic construct
RPQRAGAGGRGAGGR

SEQ ID NO: 6534 - protein, 15 aa, synthetic construct
RSRRPPRPLPRPRAR

SEQ ID NO: 6535 - protein, 15 aa, synthetic construct
SAREEVWGDQGAVWH

SEQ ID NO: 6536 - protein, 15 aa, synthetic construct
SGDFTALLSPARTGS

SEQ ID NO: 6537 - protein, 15 aa, synthetic construct
WEPWLTPYSSASCLL

SEQ ID NO: 6538 - protein, 15 aa, synthetic construct
WSKGTCPSRLPQRRR

SEQ ID NO: 6539 - protein, 15 aa, synthetic construct
WSRDRPSPRAQRCCC

SEQ ID NO: 6540 - protein, 15 aa, synthetic construct
WSRGARRRAAAASGW

SEQ ID NO: 6541 - protein, 15 aa, synthetic construct
WSRGPLGGKRNGGSG

SEQ ID NO: 6542 - protein, 15 aa, synthetic construct
WSRGPTISYRHRSAR

SEQ ID NO: 6543 - protein, 15 aa, synthetic construct
WSRGQADRGNGLALG

SEQ ID NO: 6544 - protein, 15 aa, synthetic construct
WSRGQAETVYRRPHL

SEQ ID NO: 6545 - protein, 15 aa, synthetic construct
WSRGRSSRRSASASA

SEQ ID NO: 6546 - protein, 15 aa, synthetic construct
WSRGSSARSGSSIAR

SEQ ID NO: 6547 - protein, 15 aa, synthetic construct
WSRGTVAPRPGAATP

SEQ ID NO: 6548 - protein, 15 aa, synthetic construct
AAAARAGGRPGAPLS

SEQ ID NO: 6549 - protein, 15 aa, synthetic construct
AAAARAGGRQEADAL

SEQ ID NO: 6550 - protein, 15 aa, synthetic construct
AGAARGRRPPGGLPG

SEQ ID NO: 6551 - protein, 15 aa, synthetic construct
AQAELPLRGRGPATA

SEQ ID NO: 6552 - protein, 15 aa, synthetic construct
AQEEGGGGGLGGAEL

SEQ ID NO: 6553 - protein, 15 aa, synthetic construct
CPSGAAPSRTWPRYS

SEQ ID NO: 6554 - protein, 15 aa, synthetic construct
CRCHRGACRCSCCCC

SEQ ID NO: 6555 - protein, 15 aa, synthetic construct
CRCPTPSGAPSTSCC

SEQ ID NO: 6556 - protein, 15 aa, synthetic construct
DGGHGDGSSADGAAV

SEQ ID NO: 6557 - protein, 15 aa, synthetic construct
DHGRRAPAPPRPRRP

SEQ ID NO: 6558 - protein, 15 aa, synthetic construct
EEVRRGWPELPGGAA

SEQ ID NO: 6559 - protein, 15 aa, synthetic construct
GSAGGFDPSDPAGPP

SEQ ID NO: 6560 - protein, 15 aa, synthetic construct
LGFPASPVVVPVPRH

SEQ ID NO: 6561 - protein, 15 aa, synthetic construct
PGGPPARGGQPDAAV

SEQ ID NO: 6562 - protein, 15 aa, synthetic construct
PGTPGPGETPHRGDP

SEQ ID NO: 6563 - protein, 15 aa, synthetic construct
RARGGPRRRGRLGPR

SEQ ID NO: 6564 - protein, 15 aa, synthetic construct
RGDAQPCGTPFWGGG

SEQ ID NO: 6565 - protein, 15 aa, synthetic construct
CLVCLAHQPGAALFR

SEQ ID NO: 6566 - protein, 15 aa, synthetic construct
CPQWETRPVTRRRCA

SEQ ID NO: 6567 - protein, 15 aa, synthetic construct
CRTWARRSWRRRERM

SEQ ID NO: 6568 - protein, 15 aa, synthetic construct
CSAWGSGAGAAPGSS

SEQ ID NO: 6569 - protein, 15 aa, synthetic construct
DPLRRRQRQRHVRPD

SEQ ID NO: 6570 - protein, 15 aa, synthetic construct
EADRPRGGGLRRVAG

SEQ ID NO: 6571 - protein, 15 aa, synthetic construct
ERGGQGAGRAAAGRV

SEQ ID NO: 6572 - protein, 15 aa, synthetic construct
GADGRGRGHRCGGRG

SEQ ID NO: 6573 - protein, 15 aa, synthetic construct
GCDSGQRRLLSASEE

SEQ ID NO: 6574 - protein, 15 aa, synthetic construct
GFPQEDEKLPALQPG

SEQ ID NO: 6575 - protein, 15 aa, synthetic construct
GLDLPAPGALHTGHH

SEQ ID NO: 6576 - protein, 15 aa, synthetic construct
GNGGRSPGTGCPLGR

SEQ ID NO: 6577 - protein, 15 aa, synthetic construct
GRGLPAELPGQDAPP

SEQ ID NO: 6578 - protein, 15 aa, synthetic construct
GSVASREQLSCPMAG

SEQ ID NO: 6579 - protein, 15 aa, synthetic construct
HGACCSSCRWPTCSR

SEQ ID NO: 6580 - protein, 15 aa, synthetic construct
IFPEGSRRRKRKWHV

SEQ ID NO: 6581 - protein, 15 aa, synthetic construct
PAPASAKSANAPPAR

SEQ ID NO: 6582 - protein, 15 aa, synthetic construct
PARQDWPPRSEAAAR

SEQ ID NO: 6583 - protein, 15 aa, synthetic construct
PEGALGPSGGRAERG

SEQ ID NO: 6584 - protein, 15 aa, synthetic construct
PGWCMWRSWLWQPQS

SEQ ID NO: 6585 - protein, 15 aa, synthetic construct
PPAGPPAARTRWTCS

SEQ ID NO: 6586 - protein, 15 aa, synthetic construct
RRRGRLAAREPKPRP

SEQ ID NO: 6587 - protein, 15 aa, synthetic construct
RSGTRGRRLQRPPKR

SEQ ID NO: 6588 - protein, 15 aa, synthetic construct
SAFERGGGCPVEISR

SEQ ID NO: 6589 - protein, 15 aa, synthetic construct
SARLGRGAPAAAASP

SEQ ID NO: 6590 - protein, 15 aa, synthetic construct
SLPSTCWSSSWAPRA

SEQ ID NO: 6591 - protein, 15 aa, synthetic construct
SLVPFLSSLGAVFCA

SEQ ID NO: 6592 - protein, 15 aa, synthetic construct
SPSLAGSAPVLPPSC

SEQ ID NO: 6593 - protein, 15 aa, synthetic construct
SPSLLTHPAPLTSRC

SEQ ID NO: 6594 - protein, 15 aa, synthetic construct
SQSVSRRPPWCFPDR

SEQ ID NO: 6595 - protein, 15 aa, synthetic construct
SSTLSRGYCTTSSTS

SEQ ID NO: 6596 - protein, 15 aa, synthetic construct
STTTMAGRPSRCTAA

SEQ ID NO: 6597 - protein, 15 aa, synthetic construct
SVAAFVPARPQIGPC

SEQ ID NO: 6598 - protein, 15 aa, synthetic construct
VRHPQPCGHRLLPGA

SEQ ID NO: 6599 - protein, 15 aa, synthetic construct
VWFVWPTSPARPFSV

SEQ ID NO: 6600 - protein, 15 aa, synthetic construct
VYYNSSSLGGRERPA

SEQ ID NO: 6601 - protein, 15 aa, synthetic construct
WPRRRRIPDGTSATA

SEQ ID NO: 6602 - protein, 15 aa, synthetic construct
WREPDPSRRLSRARC

SEQ ID NO: 6603 - protein, 15 aa, synthetic construct
WRSWESCSRSRSTTG

SEQ ID NO: 6604 - protein, 15 aa, synthetic construct
WSPTTSSPTSLWSST

SEQ ID NO: 6605 - protein, 15 aa, synthetic construct
AAGEWPQRPRAAVAA

SEQ ID NO: 6606 - protein, 15 aa, synthetic construct
AESGGRPEPRDRPER

SEQ ID NO: 6607 - protein, 15 aa, synthetic construct
AGHVAGLLSRGRTAG

SEQ ID NO: 6608 - protein, 15 aa, synthetic construct
AGLPVTWSFNEAVHG

SEQ ID NO: 6609 - protein, 15 aa, synthetic construct
ALRSSNPHTELEKPR

SEQ ID NO: 6610 - protein, 15 aa, synthetic construct
ASASSPRPRPGPPGV

SEQ ID NO: 6611 - protein, 15 aa, synthetic construct
CACPTASRRAPNSSS

SEQ ID NO: 6612 - protein, 15 aa, synthetic construct
CLSCVGAVLPAATTA

SEQ ID NO: 6613 - protein, 15 aa, synthetic construct
CRRPHRSPTARPPRR

SEQ ID NO: 6614 - protein, 15 aa, synthetic construct
CSRPPGGLASSSSST

SEQ ID NO: 6615 - protein, 15 aa, synthetic construct
DGGPSRSFCIAGSVP

SEQ ID NO: 6616 - protein, 15 aa, synthetic construct
DGRPPGRDDPSARRR

SEQ ID NO: 6617 - protein, 15 aa, synthetic construct
EEARALPPTRPLGGA

SEQ ID NO: 6618 - protein, 15 aa, synthetic construct
ESRRAGAPGRTRAAA

SEQ ID NO: 6619 - protein, 15 aa, synthetic construct
EWGPGGARGRGQRRG

SEQ ID NO: 6620 - protein, 15 aa, synthetic construct
GARDRGLPSGILPGS

SEQ ID NO: 6621 - protein, 15 aa, synthetic construct
GGDGDGVPACWSAEP

SEQ ID NO: 6622 - protein, 15 aa, synthetic construct
GGDGSEPVAPVPPAS

SEQ ID NO: 6623 - protein, 15 aa, synthetic construct
GGGRRVVATGEVPGT

SEQ ID NO: 6624 - protein, 15 aa, synthetic construct
GGPGRGCPSQWSRRR

SEQ ID NO: 6625 - protein, 15 aa, synthetic construct
GPRVRVPAPPAPGAV

SEQ ID NO: 6626 - protein, 15 aa, synthetic construct
GPSTGSPSGSGSAWP

SEQ ID NO: 6627 - protein, 15 aa, synthetic construct
GRAGPGPHLGVLEFP

SEQ ID NO: 6628 - protein, 15 aa, synthetic construct
GVVRRVPGARCAVLH

SEQ ID NO: 6629 - protein, 15 aa, synthetic construct
LLDPRSLLDPRSGRQ

SEQ ID NO: 6630 - protein, 15 aa, synthetic construct
LLVGQRAHGLLVLRA

SEQ ID NO: 6631 - protein, 15 aa, synthetic construct
LRDIIQTFTKSQKMK

SEQ ID NO: 6632 - protein, 15 aa, synthetic construct
LSRPARRPRRRGRHG

SEQ ID NO: 6633 - protein, 15 aa, synthetic construct
PAQSLMMRTPTPKVA

SEQ ID NO: 6634 - protein, 15 aa, synthetic construct
PGDAPAAPAPQRSQD

SEQ ID NO: 6635 - protein, 15 aa, synthetic construct
PRDRPSRLRPAPRPA

SEQ ID NO: 6636 - protein, 15 aa, synthetic construct
PRRWPAHGAASLTLS

SEQ ID NO: 6637 - protein, 15 aa, synthetic construct
RGALGSSAPGSSGTC

SEQ ID NO: 6638 - protein, 15 aa, synthetic construct
RGPRRPPTAVRPHPR

SEQ ID NO: 6639 - protein, 15 aa, synthetic construct
RHWLWSGWWSRPCWW

SEQ ID NO: 6640 - protein, 15 aa, synthetic construct
RTSWCTMCAPPSTSA

SEQ ID NO: 6641 - protein, 15 aa, synthetic construct
SLVPAYQEPACPGCG

SEQ ID NO: 6642 - protein, 15 aa, synthetic construct
SSLALARRRDAGPPS

SEQ ID NO: 6643 - protein, 15 aa, synthetic construct
TPTASCAWSASRRSD

SEQ ID NO: 6644 - protein, 15 aa, synthetic construct
TPTRCGRSWASWATA

SEQ ID NO: 6645 - protein, 15 aa, synthetic construct
TPVRGRHRVRGHVRR

SEQ ID NO: 6646 - protein, 15 aa, synthetic construct
TSRPCSRASFPSPAR

SEQ ID NO: 6647 - protein, 15 aa, synthetic construct
TTRNSSKKSWRRSPG

SEQ ID NO: 6648 - protein, 15 aa, synthetic construct
TTRPPARPLRRLAGF

SEQ ID NO: 6649 - protein, 15 aa, synthetic construct
VSRPKTPPLSPAPPA

SEQ ID NO: 6650 - protein, 15 aa, synthetic construct
WARGCSSWAPPSPVT

SEQ ID NO: 6651 - protein, 15 aa, synthetic construct
WAVSKASPARRGSGA

SEQ ID NO: 6652 - protein, 15 aa, synthetic construct
WGRGWAGGPGPRLAL

SEQ ID NO: 6653 - protein, 15 aa, synthetic construct
WQGQNCCSTPTSASG

SEQ ID NO: 6654 - protein, 15 aa, synthetic construct
WRQPAPPAPGTEPSA

SEQ ID NO: 6655 - protein, 15 aa, synthetic construct
WRYQAPHRTRPGAWS

SEQ ID NO: 6656 - protein, 15 aa, synthetic construct
WSSSVSSSPAWLPPL

SEQ ID NO: 6657 - protein, 15 aa, synthetic construct
AGARQPPGAVTAAAP

SEQ ID NO: 6658 - protein, 15 aa, synthetic construct
ARGQGRALSPGAAAA

SEQ ID NO: 6659 - protein, 15 aa, synthetic construct
CHPPSPTRTAAGNGG

SEQ ID NO: 6660 - protein, 15 aa, synthetic construct
CSFSAPAAVYPGPSH

SEQ ID NO: 6661 - protein, 15 aa, synthetic construct
ERPRAAAPTRRRGRP

SEQ ID NO: 6662 - protein, 15 aa, synthetic construct
EVRAGRSAVHRLGGH

SEQ ID NO: 6663 - protein, 15 aa, synthetic construct
GAGPGPAGGGAVSRG

SEQ ID NO: 6664 - protein, 15 aa, synthetic construct
GDRIRPRTFKEGTPR

SEQ ID NO: 6665 - protein, 15 aa, synthetic construct
GVSLAGAARKRRWKK

SEQ ID NO: 6666 - protein, 15 aa, synthetic construct
LVDRASVCHQPGPLL

SEQ ID NO: 6667 - protein, 15 aa, synthetic construct
PPRCPAATASAATAW

SEQ ID NO: 6668 - protein, 15 aa, synthetic construct
QELADPGGATDPRGK

SEQ ID NO: 6669 - protein, 15 aa, synthetic construct
QLPAPGGRRALAAPL

SEQ ID NO: 6670 - protein, 15 aa, synthetic construct
RAAHGRRLPLVLRRL

SEQ ID NO: 6671 - protein, 15 aa, synthetic construct
RGRSGRRRGAAAPGP

SEQ ID NO: 6672 - protein, 15 aa, synthetic construct
RRCTCWAPTSGPMST

SEQ ID NO: 6673 - protein, 15 aa, synthetic construct
RTGAKSRERGRKGTR

SEQ ID NO: 6674 - protein, 15 aa, synthetic construct
RTTSAASSARGCWTG

SEQ ID NO: 6675 - protein, 15 aa, synthetic construct
TPPSPPRTPRSSATC

SEQ ID NO: 6676 - protein, 15 aa, synthetic construct
WRAWAWAPPFPCGWP

SEQ ID NO: 6677 - protein, 15 aa, synthetic construct
WRLPRWSGQKKALEK

SEQ ID NO: 6678 - protein, 15 aa, synthetic construct
AAARWARRRRARDPR

SEQ ID NO: 6679 - protein, 15 aa, synthetic construct
AALRAARARRARLAR

SEQ ID NO: 6680 - protein, 15 aa, synthetic construct
AARAARRLRKPHGQG

SEQ ID NO: 6681 - protein, 15 aa, synthetic construct
AARRGRRRRRERSWR

SEQ ID NO: 6682 - protein, 15 aa, synthetic construct
AGRRRRLLRAGAGAR

SEQ ID NO: 6683 - protein, 15 aa, synthetic construct
AGRSRRQSLRGLEAA

SEQ ID NO: 6684 - protein, 15 aa, synthetic construct
AHAYRRRGLPRGRGR

SEQ ID NO: 6685 - protein, 15 aa, synthetic construct
AHLRVRRRRVAGGGH

SEQ ID NO: 6686 - protein, 15 aa, synthetic construct
ALRQRRGRLLQRRLR

SEQ ID NO: 6687 - protein, 15 aa, synthetic construct
ARAARAGAGPRQGGH

SEQ ID NO: 6688 - protein, 15 aa, synthetic construct
ARAARGLRWGHGSAA

SEQ ID NO: 6689 - protein, 15 aa, synthetic construct
ARAARHREPGRWEPR

SEQ ID NO: 6690 - protein, 15 aa, synthetic construct
ARAARPPRRPSSGCG

SEQ ID NO: 6691 - protein, 15 aa, synthetic construct
ARAARQAAQGPGPAA

SEQ ID NO: 6692 - protein, 15 aa, synthetic construct
ARAARQSCTRCPSSK

SEQ ID NO: 6693 - protein, 15 aa, synthetic construct
ARAARRRQRQRRRAA

SEQ ID NO: 6694 - protein, 15 aa, synthetic construct
ARARRRRRARRPWPS

SEQ ID NO: 6695 - protein, 15 aa, synthetic construct
ARARRRRRRRRRRAT

SEQ ID NO: 6696 - protein, 15 aa, synthetic construct
ARCRGRRRRGAAAGG

SEQ ID NO: 6697 - protein, 15 aa, synthetic construct
ARGARRCGCSCRARS

SEQ ID NO: 6698 - protein, 15 aa, synthetic construct
ARGARRGRAGPGAPR

SEQ ID NO: 6699 - protein, 15 aa, synthetic construct
ARGRRGAAATAAAVR

SEQ ID NO: 6700 - protein, 15 aa, synthetic construct
ARGRRRLHPRWGPAT

SEQ ID NO: 6701 - protein, 15 aa, synthetic construct
ARGRRRRGQICEPEP

SEQ ID NO: 6702 - protein, 15 aa, synthetic construct
ARGRRWRRRGGARAH

SEQ ID NO: 6703 - protein, 15 aa, synthetic construct
ARLGRRRRRLRGQVH

SEQ ID NO: 6704 - protein, 15 aa, synthetic construct
ARPRRGGRRRQEAGH

SEQ ID NO: 6705 - protein, 15 aa, synthetic construct
ARPRRGRGRARPPRG

SEQ ID NO: 6706 - protein, 15 aa, synthetic construct
ARSARWSGARRRRTW

SEQ ID NO: 6707 - protein, 15 aa, synthetic construct
ARSRRGAGSGGRRSR

SEQ ID NO: 6708 - protein, 15 aa, synthetic construct
ARSRRGPRWPGPGPQ

SEQ ID NO: 6709 - protein, 15 aa, synthetic construct
ARSRRRCRRRRRRDA

SEQ ID NO: 6710 - protein, 15 aa, synthetic construct
AWAGSQVQPRVRSRR

SEQ ID NO: 6711 - protein, 15 aa, synthetic construct
DPGLLHCIPPGQTQE

SEQ ID NO: 6712 - protein, 15 aa, synthetic construct
GARRRRRMGSGSRCY

SEQ ID NO: 6713 - protein, 15 aa, synthetic construct
GCGGSARSSPRSASG

SEQ ID NO: 6714 - protein, 15 aa, synthetic construct
GQDKPDICERIHSSG

SEQ ID NO: 6715 - protein, 15 aa, synthetic construct
GRAADRVSEKEAEAG

SEQ ID NO: 6716 - protein, 15 aa, synthetic construct
GRAYRAASPALAPRG

SEQ ID NO: 6717 - protein, 15 aa, synthetic construct
LKTSFARRTASRPGP

SEQ ID NO: 6718 - protein, 15 aa, synthetic construct
LSTAPTSPSPAGRRC

SEQ ID NO: 6719 - protein, 15 aa, synthetic construct
LWLWLWGLWVQLLCA

SEQ ID NO: 6720 - protein, 15 aa, synthetic construct
PARAYRRAGAAAGRA

SEQ ID NO: 6721 - protein, 15 aa, synthetic construct
PMVPEEAVPLLRVPG

SEQ ID NO: 6722 - protein, 15 aa, synthetic construct
QLGPAPKRPLSAPRT

SEQ ID NO: 6723 - protein, 15 aa, synthetic construct
RERAKPPAACPAGRP

SEQ ID NO: 6724 - protein, 15 aa, synthetic construct
RRNARKRPDRRLVER

SEQ ID NO: 6725 - protein, 15 aa, synthetic construct
RRRCSLRRRGAGLRA

SEQ ID NO: 6726 - protein, 15 aa, synthetic construct
RRVGAGQRQRARGHR

SEQ ID NO: 6727 - protein, 15 aa, synthetic construct
SCSSRSPRAVAAWPP

SEQ ID NO: 6728 - protein, 15 aa, synthetic construct
SSLPIGSRAAVVLPP

SEQ ID NO: 6729 - protein, 15 aa, synthetic construct
TSTQPAQKAGLGAAP

SEQ ID NO: 6730 - protein, 15 aa, synthetic construct
WARRARRRRRAAARR

SEQ ID NO: 6731 - protein, 15 aa, synthetic construct
AAAATAARAAAGGSG

SEQ ID NO: 6732 - protein, 15 aa, synthetic construct
AAPKTPKQAWKSRPA

SEQ ID NO: 6733 - protein, 15 aa, synthetic construct
AAPPRLAGPRRRRVS

SEQ ID NO: 6734 - protein, 15 aa, synthetic construct
AAPPRSRAGPGRPAA

SEQ ID NO: 6735 - protein, 15 aa, synthetic construct
ALRGHRLQPAFGHHQ

SEQ ID NO: 6736 - protein, 15 aa, synthetic construct
EAPESLPAPAALGAG

SEQ ID NO: 6737 - protein, 15 aa, synthetic construct
EASSPFQPALYPASL

SEQ ID NO: 6738 - protein, 15 aa, synthetic construct
EEGIPRRLPLPEGVR

SEQ ID NO: 6739 - protein, 15 aa, synthetic construct
GDSSQEDPALPSASD

SEQ ID NO: 6740 - protein, 15 aa, synthetic construct
GRALCPWGPGARQLP

SEQ ID NO: 6741 - protein, 15 aa, synthetic construct
GTSGAAERVSVSRGP

SEQ ID NO: 6742 - protein, 15 aa, synthetic construct
PAQQPGAGGRPGHDE

SEQ ID NO: 6743 - protein, 15 aa, synthetic construct
RPAAGPGHRAPAPAA

SEQ ID NO: 6744 - protein, 15 aa, synthetic construct
RPAPEPALTLCGGIA

SEQ ID NO: 6745 - protein, 15 aa, synthetic construct
RPGPGSQDAAAPRRA

SEQ ID NO: 6746 - protein, 15 aa, synthetic construct
RPLRQPGPAQPARPG

SEQ ID NO: 6747 - protein, 15 aa, synthetic construct
RPQPGWLRSRGGGGG

SEQ ID NO: 6748 - protein, 15 aa, synthetic construct
RPRAAAPSAGPWGAW

SEQ ID NO: 6749 - protein, 15 aa, synthetic construct
RPRPGTVGHRAPGVA

SEQ ID NO: 6750 - protein, 15 aa, synthetic construct
RPSEPSRPRPAAAGA

SEQ ID NO: 6751 - protein, 15 aa, synthetic construct
SARAGSARPAACGPA

SEQ ID NO: 6752 - protein, 15 aa, synthetic construct
SPCAAAAASRRSCAA

SEQ ID NO: 6753 - protein, 15 aa, synthetic construct
SSCCSAWGPGPMATS

SEQ ID NO: 6754 - protein, 15 aa, synthetic construct
TFLPPAPAALGRRHD

SEQ ID NO: 6755 - protein, 15 aa, synthetic construct
WRNEAWSRRRPRWRR

SEQ ID NO: 6756 - protein, 15 aa, synthetic construct
WRRVSYGPQCLWWMD

SEQ ID NO: 6757 - protein, 15 aa, synthetic construct
AAAAALGAEESRAAA

SEQ ID NO: 6758 - protein, 15 aa, synthetic construct
AAAAQPAASHLHAHL

SEQ ID NO: 6759 - protein, 15 aa, synthetic construct
AAGAQGLAGLDPAQL

SEQ ID NO: 6760 - protein, 15 aa, synthetic construct
AAPASAAQCQPRRLP

SEQ ID NO: 6761 - protein, 15 aa, synthetic construct
AAPSALQAASQDVGQ

SEQ ID NO: 6762 - protein, 15 aa, synthetic construct
AAQGPRPAAPAASAP

SEQ ID NO: 6763 - protein, 15 aa, synthetic construct
ADRARPASPAWDPEA

SEQ ID NO: 6764 - protein, 15 aa, synthetic construct
AGGWRGGGGGVRGRR

SEQ ID NO: 6765 - protein, 15 aa, synthetic construct
APPRPPRRGHQGAHR

SEQ ID NO: 6766 - protein, 15 aa, synthetic construct
AVAGPGPGTPAARGR

SEQ ID NO: 6767 - protein, 15 aa, synthetic construct
CAALARGRAWRGPCR

SEQ ID NO: 6768 - protein, 15 aa, synthetic construct
CADLTTDAPHAGRDR

SEQ ID NO: 6769 - protein, 15 aa, synthetic construct
CAGRPPPSVARRGPG

SEQ ID NO: 6770 - protein, 15 aa, synthetic construct
CCCSAPGRPAAPAQS

SEQ ID NO: 6771 - protein, 15 aa, synthetic construct
CGGPAAWAAAPRAPE

SEQ ID NO: 6772 - protein, 15 aa, synthetic construct
CIRSSILSCWHWASW

SEQ ID NO: 6773 - protein, 15 aa, synthetic construct
CLAPTTARETPTQDL

SEQ ID NO: 6774 - protein, 15 aa, synthetic construct
CPVGAGLILTTEGPT

SEQ ID NO: 6775 - protein, 15 aa, synthetic construct
CRPKPPEKRPPPPPL

SEQ ID NO: 6776 - protein, 15 aa, synthetic construct
DVVRGAEHRAHAVQS

SEQ ID NO: 6777 - protein, 15 aa, synthetic construct
ERAARGRQGGDAGQG

SEQ ID NO: 6778 - protein, 15 aa, synthetic construct
FLGCFWRPWCCCCPP

SEQ ID NO: 6779 - protein, 15 aa, synthetic construct
GDAGGQGAVGPVPQA

SEQ ID NO: 6780 - protein, 15 aa, synthetic construct
GGACAGGALGPGRDF

SEQ ID NO: 6781 - protein, 15 aa, synthetic construct
GGTEAPGPPQLAEGG

SEQ ID NO: 6782 - protein, 15 aa, synthetic construct
GRCRPPAPAAAPSAA

SEQ ID NO: 6783 - protein, 15 aa, synthetic construct
GRGAAESAAGPRGRQ

SEQ ID NO: 6784 - protein, 15 aa, synthetic construct
GSTRTAAGFGAAAGV

SEQ ID NO: 6785 - protein, 15 aa, synthetic construct
LGPARPAARSPLRPL

SEQ ID NO: 6786 - protein, 15 aa, synthetic construct
MDKAQRKPLRFLTSK

SEQ ID NO: 6787 - protein, 15 aa, synthetic construct
PGGAVPAERGVQHPP

SEQ ID NO: 6788 - protein, 15 aa, synthetic construct
PLSFLNTWKRPSFLA

SEQ ID NO: 6789 - protein, 15 aa, synthetic construct
PPCCAPRPPGYGRFT

SEQ ID NO: 6790 - protein, 15 aa, synthetic construct
PPRRPGGGGAAATAA

SEQ ID NO: 6791 - protein, 15 aa, synthetic construct
PRRCRPPRLLLGLGV

SEQ ID NO: 6792 - protein, 15 aa, synthetic construct
PRSRPAAAAQAGGPR

SEQ ID NO: 6793 - protein, 15 aa, synthetic construct
RGAERGPAGALAALG

SEQ ID NO: 6794 - protein, 15 aa, synthetic construct
RHHGRGLLRERGRVG

SEQ ID NO: 6795 - protein, 15 aa, synthetic construct
RPRPPPPIRRVRAPA

SEQ ID NO: 6796 - protein, 15 aa, synthetic construct
SEGAQGRSAQGTRNQ

SEQ ID NO: 6797 - protein, 15 aa, synthetic construct
SEPPAIFLSPPSTSA

SEQ ID NO: 6798 - protein, 15 aa, synthetic construct
SHEQVTQHAPDHAIS

SEQ ID NO: 6799 - protein, 15 aa, synthetic construct
SPGQCCPLKPCPGVQ

SEQ ID NO: 6800 - protein, 15 aa, synthetic construct
SPVPADSLRWRHQEA

SEQ ID NO: 6801 - protein, 15 aa, synthetic construct
VKARPGRPGPQEARG

SEQ ID NO: 6802 - protein, 15 aa, synthetic construct
VPAAAQAQDAAQEGQ

SEQ ID NO: 6803 - protein, 15 aa, synthetic construct
WAAKKMRARGVRRPV

SEQ ID NO: 6804 - protein, 15 aa, synthetic construct
WARAGRCCWRCCWLG

SEQ ID NO: 6805 - protein, 15 aa, synthetic construct
WPGRGRPGGAAASCA

SEQ ID NO: 6806 - protein, 15 aa, synthetic construct
AAAAAGSGRLSCRMC

SEQ ID NO: 6807 - protein, 15 aa, synthetic construct
AAAAGAATPGPARRT

SEQ ID NO: 6808 - protein, 15 aa, synthetic construct
AAAAGTGGQNAAGVC

SEQ ID NO: 6809 - protein, 15 aa, synthetic construct
AAAALRPRPRRRPAW

SEQ ID NO: 6810 - protein, 15 aa, synthetic construct
AAAARGPVAGPSAAA

SEQ ID NO: 6811 - protein, 15 aa, synthetic construct
AAAARRSSSASPTSC

SEQ ID NO: 6812 - protein, 15 aa, synthetic construct
AAAARTARRTRCTAA

SEQ ID NO: 6813 - protein, 15 aa, synthetic construct
AAAATTTTTAKAAGG

SEQ ID NO: 6814 - protein, 15 aa, synthetic construct
AAADPARHVHRPRAP

SEQ ID NO: 6815 - protein, 15 aa, synthetic construct
AAAGCRLPRGLRAAA

SEQ ID NO: 6816 - protein, 15 aa, synthetic construct
AAALVWPHRGELGAA

SEQ ID NO: 6817 - protein, 15 aa, synthetic construct
AAAPPQKEGRGAEKE

SEQ ID NO: 6818 - protein, 15 aa, synthetic construct
AAEDAGAVPPELHEL

SEQ ID NO: 6819 - protein, 15 aa, synthetic construct
AAEEARRERRGPGAQ

SEQ ID NO: 6820 - protein, 15 aa, synthetic construct
AAEVGLRAARRAVLT

SEQ ID NO: 6821 - protein, 15 aa, synthetic construct
AAGAAVHAARAAAGG

SEQ ID NO: 6822 - protein, 15 aa, synthetic construct
AAGGGRRPYAAHWTR

SEQ ID NO: 6823 - protein, 15 aa, synthetic construct
AAGLEELLDPHGLHH

SEQ ID NO: 6824 - protein, 15 aa, synthetic construct
AAGPEAHLQRMQDHV

SEQ ID NO: 6825 - protein, 15 aa, synthetic construct
AAGPGRGERLPAARG

SEQ ID NO: 6826 - protein, 15 aa, synthetic construct
AAGRGAAAAGRGPTG

SEQ ID NO: 6827 - protein, 15 aa, synthetic construct
AAGTPARARGDARPT

SEQ ID NO: 6828 - protein, 15 aa, synthetic construct
AALCAKAACRLDARG

SEQ ID NO: 6829 - protein, 15 aa, synthetic construct
AALPARRGAVCGLRL

SEQ ID NO: 6830 - protein, 15 aa, synthetic construct
AALQDHRGCVELPLV

SEQ ID NO: 6831 - protein, 15 aa, synthetic construct
AAPAHLPAPARHDAA

SEQ ID NO: 6832 - protein, 15 aa, synthetic construct
AAPAPGRAAGRRGRA

SEQ ID NO: 6833 - protein, 15 aa, synthetic construct
AAPCAFGGSTAASCA

SEQ ID NO: 6834 - protein, 15 aa, synthetic construct
AAPGHGPADVVPGAL

SEQ ID NO: 6835 - protein, 15 aa, synthetic construct
AAPPPWLTAPAACWR

SEQ ID NO: 6836 - protein, 15 aa, synthetic construct
AAPQAVGHPAASPAA

SEQ ID NO: 6837 - protein, 15 aa, synthetic construct
AARHWAPAGRRPEPA

SEQ ID NO: 6838 - protein, 15 aa, synthetic construct
AASPCAAVCQLVPAP

SEQ ID NO: 6839 - protein, 15 aa, synthetic construct
AAVPEPAGSCGPFGC

SEQ ID NO: 6840 - protein, 15 aa, synthetic construct
AAVRTARAGGARPIF

SEQ ID NO: 6841 - protein, 15 aa, synthetic construct
AAWTARSGTAAARRS

SEQ ID NO: 6842 - protein, 15 aa, synthetic construct
ADPGVRPQPGSGLPD

SEQ ID NO: 6843 - protein, 15 aa, synthetic construct
ADVLRHPVRLLPAAA

SEQ ID NO: 6844 - protein, 15 aa, synthetic construct
AEPAGGPGLGHLHLG

SEQ ID NO: 6845 - protein, 15 aa, synthetic construct
AFCPPKAPDSFLRSN

SEQ ID NO: 6846 - protein, 15 aa, synthetic construct
AFPTDARPVRAPPKP

SEQ ID NO: 6847 - protein, 15 aa, synthetic construct
AFPVLSMRRLEVCLR

SEQ ID NO: 6848 - protein, 15 aa, synthetic construct
AGAAAALRVFQRRER

SEQ ID NO: 6849 - protein, 15 aa, synthetic construct
AGAWEYRAGGAHGAG

SEQ ID NO: 6850 - protein, 15 aa, synthetic construct
AGDEGAAAAAAAPLR

SEQ ID NO: 6851 - protein, 15 aa, synthetic construct
AGERSSRRWRRHQGP

SEQ ID NO: 6852 - protein, 15 aa, synthetic construct
AGGAAEALEGAGDLG

SEQ ID NO: 6853 - protein, 15 aa, synthetic construct
AGGPQQVVRALEPAR

SEQ ID NO: 6854 - protein, 15 aa, synthetic construct
AGPARRSTATPCASR

SEQ ID NO: 6855 - protein, 15 aa, synthetic construct
AGPWPSCTSPRRLGS

SEQ ID NO: 6856 - protein, 15 aa, synthetic construct
AGQRLPTPSGDPQQR

SEQ ID NO: 6857 - protein, 15 aa, synthetic construct
AGRPGRFLGALGAGG

SEQ ID NO: 6858 - protein, 15 aa, synthetic construct
AGRTELRLRRPPLRQ

SEQ ID NO: 6859 - protein, 15 aa, synthetic construct
AGSPGSLRLRDATAA

SEQ ID NO: 6860 - protein, 15 aa, synthetic construct
AGSTEREGVDAGPGE

SEQ ID NO: 6861 - protein, 15 aa, synthetic construct
AHPFSVHGCAPRPQA

SEQ ID NO: 6862 - protein, 15 aa, synthetic construct
AIPAAPLWPAETHRG

SEQ ID NO: 6863 - protein, 15 aa, synthetic construct
AIYEDGPVELSVLGQ

SEQ ID NO: 6864 - protein, 15 aa, synthetic construct
AKPRSRRTHEGPRRH

SEQ ID NO: 6865 - protein, 15 aa, synthetic construct
ALAGPAALPVRQRVR

SEQ ID NO: 6866 - protein, 15 aa, synthetic construct
ALAPAPVQGQPCHPA

SEQ ID NO: 6867 - protein, 15 aa, synthetic construct
ALPGSGFPRAVQALP

SEQ ID NO: 6868 - protein, 15 aa, synthetic construct
ALPPAGQRPRGRLQK

SEQ ID NO: 6869 - protein, 15 aa, synthetic construct
ALQPASPVRGARAGR

SEQ ID NO: 6870 - protein, 15 aa, synthetic construct
APPPGAVGGHGDRAA

SEQ ID NO: 6871 - protein, 15 aa, synthetic construct
APWLQLVRGARGCWE

SEQ ID NO: 6872 - protein, 15 aa, synthetic construct
APWPGGWEAAPSRCY

SEQ ID NO: 6873 - protein, 15 aa, synthetic construct
AQLPGAGAGPGTCSG

SEQ ID NO: 6874 - protein, 15 aa, synthetic construct
AQQDRPQDGRERRPR

SEQ ID NO: 6875 - protein, 15 aa, synthetic construct
AQRLQLPDQLRHAVP

SEQ ID NO: 6876 - protein, 15 aa, synthetic construct
AQSGRAPGSRRWPRP

SEQ ID NO: 6877 - protein, 15 aa, synthetic construct
AQSTVWASRTSALPM

SEQ ID NO: 6878 - protein, 15 aa, synthetic construct
ARACTRACPGEEKEP

SEQ ID NO: 6879 - protein, 15 aa, synthetic construct
ARARASRVSGWAAAT

SEQ ID NO: 6880 - protein, 15 aa, synthetic construct
ARASSTRRAVSTATL

SEQ ID NO: 6881 - protein, 15 aa, synthetic construct
ARGRGPSGGGGRLGP

SEQ ID NO: 6882 - protein, 15 aa, synthetic construct
ARGSPRSSLRRRRAA

SEQ ID NO: 6883 - protein, 15 aa, synthetic construct
ARHPAAAARAARALL

SEQ ID NO: 6884 - protein, 15 aa, synthetic construct
ARLCGVHLGLGALCP

SEQ ID NO: 6885 - protein, 15 aa, synthetic construct
ARLHGRHAGRRGHRL

SEQ ID NO: 6886 - protein, 15 aa, synthetic construct
ARRPGGAAARRPPRH

SEQ ID NO: 6887 - protein, 15 aa, synthetic construct
ARRVLRSHLGTHAVS

SEQ ID NO: 6888 - protein, 15 aa, synthetic construct
ARSHAPLRLRPGAFG

SEQ ID NO: 6889 - protein, 15 aa, synthetic construct
ARTRARIYLPVAAEA

SEQ ID NO: 6890 - protein, 15 aa, synthetic construct
ARVHSQPAPRAGAGR

SEQ ID NO: 6891 - protein, 15 aa, synthetic construct
ASPCKVDSAAKWCFR

SEQ ID NO: 6892 - protein, 15 aa, synthetic construct
ASWRPGAAAHACNPS

SEQ ID NO: 6893 - protein, 15 aa, synthetic construct
ATGGAAGPRAALATS

SEQ ID NO: 6894 - protein, 15 aa, synthetic construct
ATRGIQTLFAGAVFR

SEQ ID NO: 6895 - protein, 15 aa, synthetic construct
ATTAAALASARRRGA

SEQ ID NO: 6896 - protein, 15 aa, synthetic construct
AVAELHVSGPPGAGL

SEQ ID NO: 6897 - protein, 15 aa, synthetic construct
AVAKGAVAPVGAPRG

SEQ ID NO: 6898 - protein, 15 aa, synthetic construct
AVAPAVGAVAPAVGA

SEQ ID NO: 6899 - protein, 15 aa, synthetic construct
AVAPVEAPRGAVAPA

SEQ ID NO: 6900 - protein, 15 aa, synthetic construct
AVDEGVGAGAGGCCP

SEQ ID NO: 6901 - protein, 15 aa, synthetic construct
AVDPIAGRDGVSTAA

SEQ ID NO: 6902 - protein, 15 aa, synthetic construct
AVDSAVSGLAGPELS

SEQ ID NO: 6903 - protein, 15 aa, synthetic construct
AVERLPAFRGAPRLP

SEQ ID NO: 6904 - protein, 15 aa, synthetic construct
AVERLPARHAEPAAA

SEQ ID NO: 6905 - protein, 15 aa, synthetic construct
AVGTDAEPSAEDLGA

SEQ ID NO: 6906 - protein, 15 aa, synthetic construct
AVLCDEAGRGADGGG

SEQ ID NO: 6907 - protein, 15 aa, synthetic construct
AVLLAPHAGAARLHG

SEQ ID NO: 6908 - protein, 15 aa, synthetic construct
AVPAAVPAAVRPPAA

SEQ ID NO: 6909 - protein, 15 aa, synthetic construct
AVPDAGSPPDRPGLA

SEQ ID NO: 6910 - protein, 15 aa, synthetic construct
AVPKENQKRSVQAGR

SEQ ID NO: 6911 - protein, 15 aa, synthetic construct
AVPLENPYGGASILA

SEQ ID NO: 6912 - protein, 15 aa, synthetic construct
AVPQHLPEVLADALL

SEQ ID NO: 6913 - protein, 15 aa, synthetic construct
AVPVLAGEAGVDRPG

SEQ ID NO: 6914 - protein, 15 aa, synthetic construct
AVSGAASAPADWPEN

SEQ ID NO: 6915 - protein, 15 aa, synthetic construct
AWGARGARRGGPCRL

SEQ ID NO: 6916 - protein, 15 aa, synthetic construct
AWSHENICLYFGCSH

SEQ ID NO: 6917 - protein, 15 aa, synthetic construct
AYHKEDIDVLIKLFH

SEQ ID NO: 6918 - protein, 15 aa, synthetic construct
CAALWSAPGVGGTVP

SEQ ID NO: 6919 - protein, 15 aa, synthetic construct
CAEKPPQDEHQGQRD

SEQ ID NO: 6920 - protein, 15 aa, synthetic construct
CAGAGEQGLRVGGGD

SEQ ID NO: 6921 - protein, 15 aa, synthetic construct
CARLAAVFTAQAPSG

SEQ ID NO: 6922 - protein, 15 aa, synthetic construct
CCGPATKRGPRRRKG

SEQ ID NO: 6923 - protein, 15 aa, synthetic construct
CCLQALLPAHLPAQM

SEQ ID NO: 6924 - protein, 15 aa, synthetic construct
CCPASGSSPGTSALR

SEQ ID NO: 6925 - protein, 15 aa, synthetic construct
CCPERKPKTKCPSRP

SEQ ID NO: 6926 - protein, 15 aa, synthetic construct
CCPPGRAACPGARRC

SEQ ID NO: 6927 - protein, 15 aa, synthetic construct
CEASVSWEPLAPCCS

SEQ ID NO: 6928 - protein, 15 aa, synthetic construct
CEVLRIAARVASRDG

SEQ ID NO: 6929 - protein, 15 aa, synthetic construct
CFGLGQPLGRPSPLA

SEQ ID NO: 6930 - protein, 15 aa, synthetic construct
CFPAPRGRDPAIEQE

SEQ ID NO: 6931 - protein, 15 aa, synthetic construct
CGALREEGFSASSRP

SEQ ID NO: 6932 - protein, 15 aa, synthetic construct
CGATCASWCCVWPAA

SEQ ID NO: 6933 - protein, 15 aa, synthetic construct
CGGSGSCGRRRCCSC

SEQ ID NO: 6934 - protein, 15 aa, synthetic construct
CGPPCGAGQPGWEPC

SEQ ID NO: 6935 - protein, 15 aa, synthetic construct
CGSSSEVGTPSVSCY

SEQ ID NO: 6936 - protein, 15 aa, synthetic construct
CGTASPGRCWWPRPW

SEQ ID NO: 6937 - protein, 15 aa, synthetic construct
CGTPLRAPTWEPRGT

SEQ ID NO: 6938 - protein, 15 aa, synthetic construct
CHAGHSDPVCRRCIS

SEQ ID NO: 6939 - protein, 15 aa, synthetic construct
CHIWWTLHQETCQLE

SEQ ID NO: 6940 - protein, 15 aa, synthetic construct
CHLRVPAYQRHVAGR

SEQ ID NO: 6941 - protein, 15 aa, synthetic construct
CLAAAKAGRVLAKAA

SEQ ID NO: 6942 - protein, 15 aa, synthetic construct
CLCVHPSGQWHAPLP

SEQ ID NO: 6943 - protein, 15 aa, synthetic construct
CLGAAKAGRVWAKEA

SEQ ID NO: 6944 - protein, 15 aa, synthetic construct
CLGEATPSLGPGAAS

SEQ ID NO: 6945 - protein, 15 aa, synthetic construct
CLPVARLSASTWAPP

SEQ ID NO: 6946 - protein, 15 aa, synthetic construct
CLVAAKAEKAWGRVV

SEQ ID NO: 6947 - protein, 15 aa, synthetic construct
CLVAAKAERDWVKEA

SEQ ID NO: 6948 - protein, 15 aa, synthetic construct
CLYKGSCNTAAMAIW

SEQ ID NO: 6949 - protein, 15 aa, synthetic construct
CNRGSPQGGARRRGD

SEQ ID NO: 6950 - protein, 15 aa, synthetic construct
CPAGPAPRWKGAAAA

SEQ ID NO: 6951 - protein, 15 aa, synthetic construct
CPAIAQRFVVRTAGD

SEQ ID NO: 6952 - protein, 15 aa, synthetic construct
CPARRRMTSCGTTQC

SEQ ID NO: 6953 - protein, 15 aa, synthetic construct
CPATAALGPCPFPPG

SEQ ID NO: 6954 - protein, 15 aa, synthetic construct
CPCKGHRHWAREPPG

SEQ ID NO: 6955 - protein, 15 aa, synthetic construct
CPPGGAGRGGARAAP

SEQ ID NO: 6956 - protein, 15 aa, synthetic construct
CPPPCCGGAWSCWRR

SEQ ID NO: 6957 - protein, 15 aa, synthetic construct
CPQPCSPTLASWCFW

SEQ ID NO: 6958 - protein, 15 aa, synthetic construct
CPSSAAGAAAAAAAA

SEQ ID NO: 6959 - protein, 15 aa, synthetic construct
CQGSVRNSSTTWKGK

SEQ ID NO: 6960 - protein, 15 aa, synthetic construct
CQPHFAWSPEPLPRQ

SEQ ID NO: 6961 - protein, 15 aa, synthetic construct
CQRKRTVRTRLQITT

SEQ ID NO: 6962 - protein, 15 aa, synthetic construct
CRAQRCAEAHPLLQN

SEQ ID NO: 6963 - protein, 15 aa, synthetic construct
CRDPTGRRSTNAGTW

SEQ ID NO: 6964 - protein, 15 aa, synthetic construct
CREPRKPPPQRCYRC

SEQ ID NO: 6965 - protein, 15 aa, synthetic construct
CRERAVAAAAATAVT

SEQ ID NO: 6966 - protein, 15 aa, synthetic construct
CRGCSRTRSRERRSR

SEQ ID NO: 6967 - protein, 15 aa, synthetic construct
CRRAAVTRSGGSWPT

SEQ ID NO: 6968 - protein, 15 aa, synthetic construct
CRRSSCPTSFSAKRT

SEQ ID NO: 6969 - protein, 15 aa, synthetic construct
CRRSVVQVPYSAFSS

SEQ ID NO: 6970 - protein, 15 aa, synthetic construct
CRSSESETPRPALRP

SEQ ID NO: 6971 - protein, 15 aa, synthetic construct
CRTRGPGPAETPGVA

SEQ ID NO: 6972 - protein, 15 aa, synthetic construct
CSAWPWTCGCCPGSS

SEQ ID NO: 6973 - protein, 15 aa, synthetic construct
CSGGGSSCCSTCCAY

SEQ ID NO: 6974 - protein, 15 aa, synthetic construct
CSWTPTALRRGVLLY

SEQ ID NO: 6975 - protein, 15 aa, synthetic construct
CTDLQILMYQTFQFT

SEQ ID NO: 6976 - protein, 15 aa, synthetic construct
CTGGLALLRPGRAWW

SEQ ID NO: 6977 - protein, 15 aa, synthetic construct
CTRGCSGAAPSWARP

SEQ ID NO: 6978 - protein, 15 aa, synthetic construct
CTRTWTQTWTWTQKP

SEQ ID NO: 6979 - protein, 15 aa, synthetic construct
CTSCNDENLAPWRPA

SEQ ID NO: 6980 - protein, 15 aa, synthetic construct
CTTSWSSRRTWRPRC

SEQ ID NO: 6981 - protein, 15 aa, synthetic construct
CTWCLRSSAPSPSPC

SEQ ID NO: 6982 - protein, 15 aa, synthetic construct
CVPQASGTSCCWRPP

SEQ ID NO: 6983 - protein, 15 aa, synthetic construct
CVTRMASLRKAALPL

SEQ ID NO: 6984 - protein, 15 aa, synthetic construct
CWGRAMVGPLMALFL

SEQ ID NO: 6985 - protein, 15 aa, synthetic construct
CYYCCCSGQCQAPGC

SEQ ID NO: 6986 - protein, 15 aa, synthetic construct
DASPALLHPARRGLR

SEQ ID NO: 6987 - protein, 15 aa, synthetic construct
DAWEGAAAALEPPLR

SEQ ID NO: 6988 - protein, 15 aa, synthetic construct
DDGKKARCPNSHLQH

SEQ ID NO: 6989 - protein, 15 aa, synthetic construct
DDRVHLAGAPELPPG

SEQ ID NO: 6990 - protein, 15 aa, synthetic construct
DEQWLLQPRGLGLGA

SEQ ID NO: 6991 - protein, 15 aa, synthetic construct
DFSMLSSPKTTNFSS

SEQ ID NO: 6992 - protein, 15 aa, synthetic construct
DGDLFGVCWICFLFR

SEQ ID NO: 6993 - protein, 15 aa, synthetic construct
DGRRDARPHAGLGGV

SEQ ID NO: 6994 - protein, 15 aa, synthetic construct
DHFPARWAERREQGG

SEQ ID NO: 6995 - protein, 15 aa, synthetic construct
DHPPLLGLRVCELPA

SEQ ID NO: 6996 - protein, 15 aa, synthetic construct
DPGLRGAHGGEPAAA

SEQ ID NO: 6997 - protein, 15 aa, synthetic construct
DQGRWGPWSQAAAPK

SEQ ID NO: 6998 - protein, 15 aa, synthetic construct
DRLRRGAAQRAGGPG

SEQ ID NO: 6999 - protein, 15 aa, synthetic construct
DSGFPQAKAQPSAPS

SEQ ID NO: 7000 - protein, 15 aa, synthetic construct
DSIAAPQRAAPELHT

SEQ ID NO: 7001 - protein, 15 aa, synthetic construct
DVLAAGRHGDVRATC

SEQ ID NO: 7002 - protein, 15 aa, synthetic construct
DVSMETVDPAFIHWL

SEQ ID NO: 7003 - protein, 15 aa, synthetic construct
EAAAALGVRGSAAVA

SEQ ID NO: 7004 - protein, 15 aa, synthetic construct
EAARGAAVLVGDPRG

SEQ ID NO: 7005 - protein, 15 aa, synthetic construct
EAFLVERGLDSVRHF

SEQ ID NO: 7006 - protein, 15 aa, synthetic construct
EALGDSAAALGPERL

SEQ ID NO: 7007 - protein, 15 aa, synthetic construct
EALVGRGPEALGRGL

SEQ ID NO: 7008 - protein, 15 aa, synthetic construct
EAPAPGRQPWPHCCP

SEQ ID NO: 7009 - protein, 15 aa, synthetic construct
EAPEAVVVGRRRPPA

SEQ ID NO: 7010 - protein, 15 aa, synthetic construct
EATQDVHREDRHHGR

SEQ ID NO: 7011 - protein, 15 aa, synthetic construct
EAVHGLRARGLAHPH

SEQ ID NO: 7012 - protein, 15 aa, synthetic construct
EAVSVSPDGLAGPLL

SEQ ID NO: 7013 - protein, 15 aa, synthetic construct
EDEPTGPTQTPGAGR

SEQ ID NO: 7014 - protein, 15 aa, synthetic construct
EDGQQALRDDRRAQA

SEQ ID NO: 7015 - protein, 15 aa, synthetic construct
EDNHSPCLQSVPRIK

SEQ ID NO: 7016 - protein, 15 aa, synthetic construct
EDRRSRIRQRGPFHS

SEQ ID NO: 7017 - protein, 15 aa, synthetic construct
EEAPKQVRNGAGGRR

SEQ ID NO: 7018 - protein, 15 aa, synthetic construct
EEPRGPALAAERLPG

SEQ ID NO: 7019 - protein, 15 aa, synthetic construct
EGARPWAEPSRLGGP

SEQ ID NO: 7020 - protein, 15 aa, synthetic construct
EGGEPGAPLGPQGAV

SEQ ID NO: 7021 - protein, 15 aa, synthetic construct
EGRLDASRLLCLSRF

SEQ ID NO: 7022 - protein, 15 aa, synthetic construct
EGTHCSTAFDHIAVF

SEQ ID NO: 7023 - protein, 15 aa, synthetic construct
EHGGPCSRGRVHPEA

SEQ ID NO: 7024 - protein, 15 aa, synthetic construct
EHSGTRAEGSRPGGA

SEQ ID NO: 7025 - protein, 15 aa, synthetic construct
EKNVGGRVLSVQKYL

SEQ ID NO: 7026 - protein, 15 aa, synthetic construct
EPGARAGQGSAEPAG

SEQ ID NO: 7027 - protein, 15 aa, synthetic construct
EPKFSQVSDLAILRL

SEQ ID NO: 7028 - protein, 15 aa, synthetic construct
EPQEQEAHPRGQAEC

SEQ ID NO: 7029 - protein, 15 aa, synthetic construct
EPVWYPVGGSHGDFF

SEQ ID NO: 7030 - protein, 15 aa, synthetic construct
EQLRSSALFLEPLLL

SEQ ID NO: 7031 - protein, 15 aa, synthetic construct
ERAAALGVGRRRVWG

SEQ ID NO: 7032 - protein, 15 aa, synthetic construct
ERGFCCEAVHFQNDR

SEQ ID NO: 7033 - protein, 15 aa, synthetic construct
ERGGGGPGGGHLQPA

SEQ ID NO: 7034 - protein, 15 aa, synthetic construct
ERQRFWLPACLALRG

SEQ ID NO: 7035 - protein, 15 aa, synthetic construct
ERVQSGGAGLGRRGQ

SEQ ID NO: 7036 - protein, 15 aa, synthetic construct
ESADPCSPTAPTASS

SEQ ID NO: 7037 - protein, 15 aa, synthetic construct
ESADVYTTTALWIFI

SEQ ID NO: 7038 - protein, 15 aa, synthetic construct
ESLPIPGRPLPPPRH

SEQ ID NO: 7039 - protein, 15 aa, synthetic construct
ESRGRAQAGRAGGAP

SEQ ID NO: 7040 - protein, 15 aa, synthetic construct
ESSNLFPPPVAATNA

SEQ ID NO: 7041 - protein, 15 aa, synthetic construct
EVAFCPQVSHSQVAP

SEQ ID NO: 7042 - protein, 15 aa, synthetic construct
EVCALQSPEHESYHH

SEQ ID NO: 7043 - protein, 15 aa, synthetic construct
EVDPRWPCRYHLPHH

SEQ ID NO: 7044 - protein, 15 aa, synthetic construct
EVEGAFHRGHPAGTV

SEQ ID NO: 7045 - protein, 15 aa, synthetic construct
EVEKPDFYHHIDNLR

SEQ ID NO: 7046 - protein, 15 aa, synthetic construct
EVLPLFSQDPPRPQG

SEQ ID NO: 7047 - protein, 15 aa, synthetic construct
EVLPVEMQAPEPRRP

SEQ ID NO: 7048 - protein, 15 aa, synthetic construct
FPPSGDGPEPQEGGQ

SEQ ID NO: 7049 - protein, 15 aa, synthetic construct
FSGAVGWASVPHCPC

SEQ ID NO: 7050 - protein, 15 aa, synthetic construct
FSRPGRCGDWDEAAQ

SEQ ID NO: 7051 - protein, 15 aa, synthetic construct
FVDVPDDPAWKWSPY

SEQ ID NO: 7052 - protein, 15 aa, synthetic construct
GAAAAAAAAAAQGGA

SEQ ID NO: 7053 - protein, 15 aa, synthetic construct
GAAAAADPGPTRLPG

SEQ ID NO: 7054 - protein, 15 aa, synthetic construct
GAAAPGGGGRGPRGG

SEQ ID NO: 7055 - protein, 15 aa, synthetic construct
GAAASGTPGVLLLVA

SEQ ID NO: 7056 - protein, 15 aa, synthetic construct
GAACERQDPGPSAAG

SEQ ID NO: 7057 - protein, 15 aa, synthetic construct
GAAPTALLAADPTGW

SEQ ID NO: 7058 - protein, 15 aa, synthetic construct
GAARPGPRGRAAGGR

SEQ ID NO: 7059 - protein, 15 aa, synthetic construct
GAARRGGPPEPHGQN

SEQ ID NO: 7060 - protein, 15 aa, synthetic construct
GAAVRPGGHHRHRAG

SEQ ID NO: 7061 - protein, 15 aa, synthetic construct
GADQRNLLEGFCLPG

SEQ ID NO: 7062 - protein, 15 aa, synthetic construct
GAERVWSGSPDRQLE

SEQ ID NO: 7063 - protein, 15 aa, synthetic construct
GAFSALKDRPTDRQT

SEQ ID NO: 7064 - protein, 15 aa, synthetic construct
GAGARSHRAAARAAP

SEQ ID NO: 7065 - protein, 15 aa, synthetic construct
GAGEVREEGDVASAS

SEQ ID NO: 7066 - protein, 15 aa, synthetic construct
GAGKHRGQHGLAESQ

SEQ ID NO: 7067 - protein, 15 aa, synthetic construct
GAGPGLSASGWHLPF

SEQ ID NO: 7068 - protein, 15 aa, synthetic construct
GAGQAWDPGPPGPGL

SEQ ID NO: 7069 - protein, 15 aa, synthetic construct
GAGSQGKGQGPLRGE

SEQ ID NO: 7070 - protein, 15 aa, synthetic construct
GAPCGPRRGRLRPVP

SEQ ID NO: 7071 - protein, 15 aa, synthetic construct
GAPEPGRLGPALGGL

SEQ ID NO: 7072 - protein, 15 aa, synthetic construct
GAQCAAHHQRAHGGG

SEQ ID NO: 7073 - protein, 15 aa, synthetic construct
GAQHQPRGGEAAAAQ

SEQ ID NO: 7074 - protein, 15 aa, synthetic construct
GAQRAQRPRVPRVLR

SEQ ID NO: 7075 - protein, 15 aa, synthetic construct
GAQSTRESSALSPWG

SEQ ID NO: 7076 - protein, 15 aa, synthetic construct
GARDAPRCSGRRRGR

SEQ ID NO: 7077 - protein, 15 aa, synthetic construct
GARDRAPARHGAGAD

SEQ ID NO: 7078 - protein, 15 aa, synthetic construct
GARGPAAAGLPAPRP

SEQ ID NO: 7079 - protein, 15 aa, synthetic construct
GARLGVLASSPCPGG

SEQ ID NO: 7080 - protein, 15 aa, synthetic construct
GASAVAGLQRTHGRL

SEQ ID NO: 7081 - protein, 15 aa, synthetic construct
GASGSRSALRVLEPR

SEQ ID NO: 7082 - protein, 15 aa, synthetic construct
GASHRGARAVPSYQA

SEQ ID NO: 7083 - protein, 15 aa, synthetic construct
GATEHIADADCVPFP

SEQ ID NO: 7084 - protein, 15 aa, synthetic construct
GAVDVASRRRGGGGR

SEQ ID NO: 7085 - protein, 15 aa, synthetic construct
GAVPGDWEAAAQARG

SEQ ID NO: 7086 - protein, 15 aa, synthetic construct
GAVRAAAPAGRCLPA

SEQ ID NO: 7087 - protein, 15 aa, synthetic construct
GAWAAEAETVLPSGR

SEQ ID NO: 7088 - protein, 15 aa, synthetic construct
GAWGRAGALAERALS

SEQ ID NO: 7089 - protein, 15 aa, synthetic construct
GCDQQLGRRRRPPAD

SEQ ID NO: 7090 - protein, 15 aa, synthetic construct
GCGCSHGGSLNRVGA

SEQ ID NO: 7091 - protein, 15 aa, synthetic construct
GCKGPATPLFDQRTL

SEQ ID NO: 7092 - protein, 15 aa, synthetic construct
GCKSPQVLGIPVLPG

SEQ ID NO: 7093 - protein, 15 aa, synthetic construct
GCPERVPDAGVGSGG

SEQ ID NO: 7094 - protein, 15 aa, synthetic construct
GDFGRTAGLGPARDL

SEQ ID NO: 7095 - protein, 15 aa, synthetic construct
GDGQALPRSPRGCGH

SEQ ID NO: 7096 - protein, 15 aa, synthetic construct
GDLCERAGGGQEELK

SEQ ID NO: 7097 - protein, 15 aa, synthetic construct
GDPGHELAAALLRRL

SEQ ID NO: 7098 - protein, 15 aa, synthetic construct
GEAAAPAPGRPAEGT

SEQ ID NO: 7099 - protein, 15 aa, synthetic construct
GEAAASPERPGRRGA

SEQ ID NO: 7100 - protein, 15 aa, synthetic construct
GEELHGVLPGQRVRA

SEQ ID NO: 7101 - protein, 15 aa, synthetic construct
GEGPGAAGSCSHWKC

SEQ ID NO: 7102 - protein, 15 aa, synthetic construct
GEGVGGGAAGGSRGL

SEQ ID NO: 7103 - protein, 15 aa, synthetic construct
GENRLQYPYRRAKGG

SEQ ID NO: 7104 - protein, 15 aa, synthetic construct
GERWPCANAARQHPS

SEQ ID NO: 7105 - protein, 15 aa, synthetic construct
GESQSDPEGQAGRAG

SEQ ID NO: 7106 - protein, 15 aa, synthetic construct
GFHCVGFTTSAHRPP

SEQ ID NO: 7107 - protein, 15 aa, synthetic construct
GFHLPPAGPCQTPAP

SEQ ID NO: 7108 - protein, 15 aa, synthetic construct
GFPDHGGGAAQGLAA

SEQ ID NO: 7109 - protein, 15 aa, synthetic construct
GFPELSHKSTAAASS

SEQ ID NO: 7110 - protein, 15 aa, synthetic construct
GFPSEGRGGGGGGDG

SEQ ID NO: 7111 - protein, 15 aa, synthetic construct
GFPSGSASAWLRPSR

SEQ ID NO: 7112 - protein, 15 aa, synthetic construct
GFPSQEWSAHNSAFA

SEQ ID NO: 7113 - protein, 15 aa, synthetic construct
GFPVSSASDPGLEKL

SEQ ID NO: 7114 - protein, 15 aa, synthetic construct
GFRVGGRGRVEPVLG

SEQ ID NO: 7115 - protein, 15 aa, synthetic construct
GGAGGRAPGPGLRSP

SEQ ID NO: 7116 - protein, 15 aa, synthetic construct
GGAGSSGQEGVERAA

SEQ ID NO: 7117 - protein, 15 aa, synthetic construct
GGAPTPAARLLLPHR

SEQ ID NO: 7118 - protein, 15 aa, synthetic construct
GGARRGGGGGDSLPG

SEQ ID NO: 7119 - protein, 15 aa, synthetic construct
GGASAARPRSGLGRR

SEQ ID NO: 7120 - protein, 15 aa, synthetic construct
GGAWDAALLAAECRA

SEQ ID NO: 7121 - protein, 15 aa, synthetic construct
GGCGAGGWGRQRGWR

SEQ ID NO: 7122 - protein, 15 aa, synthetic construct
GGDAGRAGQSPARVP

SEQ ID NO: 7123 - protein, 15 aa, synthetic construct
GGEAETSECGGARSY

SEQ ID NO: 7124 - protein, 15 aa, synthetic construct
GGGAGSGWVWSRPRE

SEQ ID NO: 7125 - protein, 15 aa, synthetic construct
GGGGGGGGLCRHRRE

SEQ ID NO: 7126 - protein, 15 aa, synthetic construct
GGGGGGGGSGGGRGG

SEQ ID NO: 7127 - protein, 15 aa, synthetic construct
GGGYRQLAHPSEEAS

SEQ ID NO: 7128 - protein, 15 aa, synthetic construct
GGHSAPAGPRRRARG

SEQ ID NO: 7129 - protein, 15 aa, synthetic construct
GGLIPYPGLQRRLCL

SEQ ID NO: 7130 - protein, 15 aa, synthetic construct
GGLQQVLDGAKLLAG

SEQ ID NO: 7131 - protein, 15 aa, synthetic construct
GGPKLPEETSSEQTT

SEQ ID NO: 7132 - protein, 15 aa, synthetic construct
GGQGAQRGHNGPGLF

SEQ ID NO: 7133 - protein, 15 aa, synthetic construct
GGQIRALAGHRTAGW

SEQ ID NO: 7134 - protein, 15 aa, synthetic construct
GGREAAGADPAGRAG

SEQ ID NO: 7135 - protein, 15 aa, synthetic construct
GGRGGGGSSCGGGGR

SEQ ID NO: 7136 - protein, 15 aa, synthetic construct
GGRGGPGLLQPQHHP

SEQ ID NO: 7137 - protein, 15 aa, synthetic construct
GGRRGPPSGSEWPLG

SEQ ID NO: 7138 - protein, 15 aa, synthetic construct
GGRSRGRVSPRRPLA

SEQ ID NO: 7139 - protein, 15 aa, synthetic construct
GGSERSLGRHCDWGG

SEQ ID NO: 7140 - protein, 15 aa, synthetic construct
GHHGTIRVVAQGLLD

SEQ ID NO: 7141 - protein, 15 aa, synthetic construct
GHHPQTQSPSPTRTP

SEQ ID NO: 7142 - protein, 15 aa, synthetic construct
GHPHQQQRLPRPAAG

SEQ ID NO: 7143 - protein, 15 aa, synthetic construct
GHRAPHRRRRQEPGG

SEQ ID NO: 7144 - protein, 15 aa, synthetic construct
GHRGTPAPGRLPRTP

SEQ ID NO: 7145 - protein, 15 aa, synthetic construct
GHRQPRGQGAPGAGP

SEQ ID NO: 7146 - protein, 15 aa, synthetic construct
GKDQRFHVDRIFPGR

SEQ ID NO: 7147 - protein, 15 aa, synthetic construct
GKEHRLRGEELRGPR

SEQ ID NO: 7148 - protein, 15 aa, synthetic construct
GKNGACPAVSAAASG

SEQ ID NO: 7149 - protein, 15 aa, synthetic construct
GKPRPSASGTSGRRA

SEQ ID NO: 7150 - protein, 15 aa, synthetic construct
GLCGGLGHVPALSGH

SEQ ID NO: 7151 - protein, 15 aa, synthetic construct
GLGRAGCAARWPLPT

SEQ ID NO: 7152 - protein, 15 aa, synthetic construct
GLHLPVGLGRSLSAG

SEQ ID NO: 7153 - protein, 15 aa, synthetic construct
GLHQALGRMAPELEG

SEQ ID NO: 7154 - protein, 15 aa, synthetic construct
GLLAKRRDPGRGHRG

SEQ ID NO: 7155 - protein, 15 aa, synthetic construct
GLLPGHQFETSQQWA

SEQ ID NO: 7156 - protein, 15 aa, synthetic construct
GLPHLPGQRGRPRRF

SEQ ID NO: 7157 - protein, 15 aa, synthetic construct
GLREGLRVAALHIAT

SEQ ID NO: 7158 - protein, 15 aa, synthetic construct
GLSLEHKRVSAVEVC

SEQ ID NO: 7159 - protein, 15 aa, synthetic construct
GLTRACRSWGAGVGG

SEQ ID NO: 7160 - protein, 15 aa, synthetic construct
GLWGGAPWRGLSHPE

SEQ ID NO: 7161 - protein, 15 aa, synthetic construct
GMGKPHHSGGIFSEG

SEQ ID NO: 7162 - protein, 15 aa, synthetic construct
GNGDGGGGGAPAGRA

SEQ ID NO: 7163 - protein, 15 aa, synthetic construct
GNHGSIQAIVPLLGV

SEQ ID NO: 7164 - protein, 15 aa, synthetic construct
GPAAGARLPDPRSPG

SEQ ID NO: 7165 - protein, 15 aa, synthetic construct
GPAQPTGSNGVASVA

SEQ ID NO: 7166 - protein, 15 aa, synthetic construct
GPECAALPHEDTGLV

SEQ ID NO: 7167 - protein, 15 aa, synthetic construct
GPEDQHVPGPLPTLP

SEQ ID NO: 7168 - protein, 15 aa, synthetic construct
GPGPGDLHPAGLHLL

SEQ ID NO: 7169 - protein, 15 aa, synthetic construct
GPGPGRGSQASKDQA

SEQ ID NO: 7170 - protein, 15 aa, synthetic construct
GPGQGAAESAGVWRR

SEQ ID NO: 7171 - protein, 15 aa, synthetic construct
GPGQRGAGRRSQNPG

SEQ ID NO: 7172 - protein, 15 aa, synthetic construct
GPGRQSELELRGIRR

SEQ ID NO: 7173 - protein, 15 aa, synthetic construct
GPGSPRPLCSLSPRS

SEQ ID NO: 7174 - protein, 15 aa, synthetic construct
GPGWAPAAASTAAAA

SEQ ID NO: 7175 - protein, 15 aa, synthetic construct
GPLAGHPSQEGPGWA

SEQ ID NO: 7176 - protein, 15 aa, synthetic construct
GPLGLPGAPHVGAGR

SEQ ID NO: 7177 - protein, 15 aa, synthetic construct
GPPPRRDRGDALREV

SEQ ID NO: 7178 - protein, 15 aa, synthetic construct
GPPQSERASGLCENV

SEQ ID NO: 7179 - protein, 15 aa, synthetic construct
GPQARPKPQSQRGEQ

SEQ ID NO: 7180 - protein, 15 aa, synthetic construct
GPRCLATGTPRSAPT

SEQ ID NO: 7181 - protein, 15 aa, synthetic construct
GPRGPCPLGGPGGRR

SEQ ID NO: 7182 - protein, 15 aa, synthetic construct
GPRGQDWKSSVFPRL

SEQ ID NO: 7183 - protein, 15 aa, synthetic construct
GPRRRRAAVGPAAES

SEQ ID NO: 7184 - protein, 15 aa, synthetic construct
GPSRAPGHSGHAPAL

SEQ ID NO: 7185 - protein, 15 aa, synthetic construct
GPVCTISAGANPGLL

SEQ ID NO: 7186 - protein, 15 aa, synthetic construct
GPWPRSGGIGRSLAA

SEQ ID NO: 7187 - protein, 15 aa, synthetic construct
GQPGAPARRGRRRPG

SEQ ID NO: 7188 - protein, 15 aa, synthetic construct
GQPGERRGGPGRAPL

SEQ ID NO: 7189 - protein, 15 aa, synthetic construct
GQRAGAGPHSEREHG

SEQ ID NO: 7190 - protein, 15 aa, synthetic construct
GQYRVLPVEIPRPQP

SEQ ID NO: 7191 - protein, 15 aa, synthetic construct
GRAASSELRLGGALS

SEQ ID NO: 7192 - protein, 15 aa, synthetic construct
GRACWQCPSTACASS

SEQ ID NO: 7193 - protein, 15 aa, synthetic construct
GRAGRVQEEGAALDS

SEQ ID NO: 7194 - protein, 15 aa, synthetic construct
GRAHAGGDAAAALPV

SEQ ID NO: 7195 - protein, 15 aa, synthetic construct
GRCGCCLRWSREEEV

SEQ ID NO: 7196 - protein, 15 aa, synthetic construct
GRCRGWASAGDGAAG

SEQ ID NO: 7197 - protein, 15 aa, synthetic construct
GRCSTWGRATPTSRT

SEQ ID NO: 7198 - protein, 15 aa, synthetic construct
GREGLAPHPFPGNGA

SEQ ID NO: 7199 - protein, 15 aa, synthetic construct
GRGAGRVSAARWPRP

SEQ ID NO: 7200 - protein, 15 aa, synthetic construct
GRGAPPSVPAAFHRA

SEQ ID NO: 7201 - protein, 15 aa, synthetic construct
GRGDQDQDHQHDLPV

SEQ ID NO: 7202 - protein, 15 aa, synthetic construct
GRGECPFPGRRQSGP

SEQ ID NO: 7203 - protein, 15 aa, synthetic construct
GRGGGAFFRNDLEQH

SEQ ID NO: 7204 - protein, 15 aa, synthetic construct
GRGGTGAAGPPRGPS

SEQ ID NO: 7205 - protein, 15 aa, synthetic construct
GRGHRFPHELQLSQE

SEQ ID NO: 7206 - protein, 15 aa, synthetic construct
GRGPGRPTAGAAPCS

SEQ ID NO: 7207 - protein, 15 aa, synthetic construct
GRGQGRDAADVPAAD

SEQ ID NO: 7208 - protein, 15 aa, synthetic construct
GRLQGGHEPGAAAGG

SEQ ID NO: 7209 - protein, 15 aa, synthetic construct
GRPRGPGSPPASAPP

SEQ ID NO: 7210 - protein, 15 aa, synthetic construct
GRPRPRSAWAPRRGA

SEQ ID NO: 7211 - protein, 15 aa, synthetic construct
GRPRQLPAPEDRVAA

SEQ ID NO: 7212 - protein, 15 aa, synthetic construct
GRQPAARPQRHRAEA

SEQ ID NO: 7213 - protein, 15 aa, synthetic construct
GRRGGGVRAGAVDLR

SEQ ID NO: 7214 - protein, 15 aa, synthetic construct
GRSAGGGANWGRLSP

SEQ ID NO: 7215 - protein, 15 aa, synthetic construct
GRSDIGAHFCYVFSL

SEQ ID NO: 7216 - protein, 15 aa, synthetic construct
GRTHVRRSTGLLGGE

SEQ ID NO: 7217 - protein, 15 aa, synthetic construct
GRVPRGDSHGRGRVP

SEQ ID NO: 7218 - protein, 15 aa, synthetic construct
GSAARQASQPGRRSG

SEQ ID NO: 7219 - protein, 15 aa, synthetic construct
GSADAVASPLDMPVR

SEQ ID NO: 7220 - protein, 15 aa, synthetic construct
GSCGPSGQPRPRKGG

SEQ ID NO: 7221 - protein, 15 aa, synthetic construct
GSEGHGQRRQHHPAH

SEQ ID NO: 7222 - protein, 15 aa, synthetic construct
GSGFPLHAPGHGPVP

SEQ ID NO: 7223 - protein, 15 aa, synthetic construct
GSGGDAGGCRGGEAR

SEQ ID NO: 7224 - protein, 15 aa, synthetic construct
GSGGETPVWQERRDP

SEQ ID NO: 7225 - protein, 15 aa, synthetic construct
GSGGGPVGATVGRGP

SEQ ID NO: 7226 - protein, 15 aa, synthetic construct
GSGPMGNCAKRPWRR

SEQ ID NO: 7227 - protein, 15 aa, synthetic construct
GSGSRHRRAECSWGV

SEQ ID NO: 7228 - protein, 15 aa, synthetic construct
GSHRGKQEGAWRRRG

SEQ ID NO: 7229 - protein, 15 aa, synthetic construct
GSIDQQMQEDSSPNY

SEQ ID NO: 7230 - protein, 15 aa, synthetic construct
GSNRPSLRYKTDTNQ

SEQ ID NO: 7231 - protein, 15 aa, synthetic construct
GSPGGGGPRPDPDSD

SEQ ID NO: 7232 - protein, 15 aa, synthetic construct
GSPGSGPGAGGPRLS

SEQ ID NO: 7233 - protein, 15 aa, synthetic construct
GSQETPRNPEDLRDC

SEQ ID NO: 7234 - protein, 15 aa, synthetic construct
GSSRRLWCGLSSQSR

SEQ ID NO: 7235 - protein, 15 aa, synthetic construct
GSWGSLIQPQPYPGC

SEQ ID NO: 7236 - protein, 15 aa, synthetic construct
GTASAPRRSVYSGSS

SEQ ID NO: 7237 - protein, 15 aa, synthetic construct
GTPETPSHTGPAGMG

SEQ ID NO: 7238 - protein, 15 aa, synthetic construct
GTPLSPSLQIACPLE

SEQ ID NO: 7239 - protein, 15 aa, synthetic construct
GTPVRPPRQEPGPPA

SEQ ID NO: 7240 - protein, 15 aa, synthetic construct
GTQGKGRGVHGSALA

SEQ ID NO: 7241 - protein, 15 aa, synthetic construct
GTRSSWWPCCSLGCQ

SEQ ID NO: 7242 - protein, 15 aa, synthetic construct
GTTGTERPGRFGGPE

SEQ ID NO: 7243 - protein, 15 aa, synthetic construct
GVAPRGAGGSREPAA

SEQ ID NO: 7244 - protein, 15 aa, synthetic construct
GVDGGCGRASALGLP

SEQ ID NO: 7245 - protein, 15 aa, synthetic construct
GVLPVPGCENQRPPG

SEQ ID NO: 7246 - protein, 15 aa, synthetic construct
GVPERVSPATGERLY

SEQ ID NO: 7247 - protein, 15 aa, synthetic construct
GVRAAAARRRARAVP

SEQ ID NO: 7248 - protein, 15 aa, synthetic construct
GVSAPGALLLRAPAA

SEQ ID NO: 7249 - protein, 15 aa, synthetic construct
GVSWQWPWRWGAEAV

SEQ ID NO: 7250 - protein, 15 aa, synthetic construct
GWAYPLSWASASLMP

SEQ ID NO: 7251 - protein, 15 aa, synthetic construct
GYAPGGGSRSSTLRR

SEQ ID NO: 7252 - protein, 15 aa, synthetic construct
GYGERGRTFSPGILA

SEQ ID NO: 7253 - protein, 15 aa, synthetic construct
GYNYGTLCGHTASCL

SEQ ID NO: 7254 - protein, 15 aa, synthetic construct
HAVRPLHRALRDRTG

SEQ ID NO: 7255 - protein, 15 aa, synthetic construct
HGGQQLQHPRLVPAA

SEQ ID NO: 7256 - protein, 15 aa, synthetic construct
HGPGTHAQELPRGPR

SEQ ID NO: 7257 - protein, 15 aa, synthetic construct
HGQLLQRRPGQHGRA

SEQ ID NO: 7258 - protein, 15 aa, synthetic construct
HLPHAARRLAVPARR

SEQ ID NO: 7259 - protein, 15 aa, synthetic construct
HLPHWPPCQPPGPAG

SEQ ID NO: 7260 - protein, 15 aa, synthetic construct
HPAPADGEPAELGPP

SEQ ID NO: 7261 - protein, 15 aa, synthetic construct
HRGHPRGGDARRVPA

SEQ ID NO: 7262 - protein, 15 aa, synthetic construct
HRLRPGQEGLRGRRE

SEQ ID NO: 7263 - protein, 15 aa, synthetic construct
HVHPAARPPGHARHA

SEQ ID NO: 7264 - protein, 15 aa, synthetic construct
ILRGHSVHKGACYRC

SEQ ID NO: 7265 - protein, 15 aa, synthetic construct
IRASGSSNMARWRSS

SEQ ID NO: 7266 - protein, 15 aa, synthetic construct
IRGPDPCRTALCPDH

SEQ ID NO: 7267 - protein, 15 aa, synthetic construct
ITPQEQEEQESPGAG

SEQ ID NO: 7268 - protein, 15 aa, synthetic construct
KARPRTQGGAGSQAW

SEQ ID NO: 7269 - protein, 15 aa, synthetic construct
KKERAAVAGSRRPRW

SEQ ID NO: 7270 - protein, 15 aa, synthetic construct
LAGQPPRSPAAPGTL

SEQ ID NO: 7271 - protein, 15 aa, synthetic construct
LCCGEPRTFWSRGTA

SEQ ID NO: 7272 - protein, 15 aa, synthetic construct
LCGADPPAPACTCAH

SEQ ID NO: 7273 - protein, 15 aa, synthetic construct
LDLAGKWSHHLCSEM

SEQ ID NO: 7274 - protein, 15 aa, synthetic construct
LEPRRRRACGGGRGG

SEQ ID NO: 7275 - protein, 15 aa, synthetic construct
LGPGAPLGPQADRPP

SEQ ID NO: 7276 - protein, 15 aa, synthetic construct
LGPPARRPAGQRGPG

SEQ ID NO: 7277 - protein, 15 aa, synthetic construct
LGPQKGTGGRQPTPG

SEQ ID NO: 7278 - protein, 15 aa, synthetic construct
LGPRRAQAGGSRPLV

SEQ ID NO: 7279 - protein, 15 aa, synthetic construct
LGQPAGTSWCRGPCR

SEQ ID NO: 7280 - protein, 15 aa, synthetic construct
LGRGGCEHRCPRLWA

SEQ ID NO: 7281 - protein, 15 aa, synthetic construct
LHGAAHAHPHRAGGP

SEQ ID NO: 7282 - protein, 15 aa, synthetic construct
LIPAITGLYLQPPEV

SEQ ID NO: 7283 - protein, 15 aa, synthetic construct
LKAVAPNPALNCPGC

SEQ ID NO: 7284 - protein, 15 aa, synthetic construct
LPAPLTASVPGASSF

SEQ ID NO: 7285 - protein, 15 aa, synthetic construct
LPHPPAFQAFGHCLP

SEQ ID NO: 7286 - protein, 15 aa, synthetic construct
LPHRRDREALFHRGN

SEQ ID NO: 7287 - protein, 15 aa, synthetic construct
LPRVRLAAAQPRAAP

SEQ ID NO: 7288 - protein, 15 aa, synthetic construct
LPSSAMCRSTSSSTK

SEQ ID NO: 7289 - protein, 15 aa, synthetic construct
LPYSHQRPRQGPLVR

SEQ ID NO: 7290 - protein, 15 aa, synthetic construct
LQEGERQGGGRGRGA

SEQ ID NO: 7291 - protein, 15 aa, synthetic construct
LQLSLVDLQRQEGGK

SEQ ID NO: 7292 - protein, 15 aa, synthetic construct
LQRDEVQTAAGGRHS

SEQ ID NO: 7293 - protein, 15 aa, synthetic construct
LREAAGHPAPSAVAV

SEQ ID NO: 7294 - protein, 15 aa, synthetic construct
LRGRHQPPDQPGALR

SEQ ID NO: 7295 - protein, 15 aa, synthetic construct
LRGSRAGGWQHHYRH

SEQ ID NO: 7296 - protein, 15 aa, synthetic construct
LRIQGCSCHGRCLYW

SEQ ID NO: 7297 - protein, 15 aa, synthetic construct
LRPGRWPGLPLLPGA

SEQ ID NO: 7298 - protein, 15 aa, synthetic construct
LRRAQADQAQRQGVR

SEQ ID NO: 7299 - protein, 15 aa, synthetic construct
LRTAAAAGTGRWAGA

SEQ ID NO: 7300 - protein, 15 aa, synthetic construct
LSAEKETKAQQEPPP

SEQ ID NO: 7301 - protein, 15 aa, synthetic construct
LSAGLAGPRPRAAAT

SEQ ID NO: 7302 - protein, 15 aa, synthetic construct
LSAIVRCSGITSRAL

SEQ ID NO: 7303 - protein, 15 aa, synthetic construct
LSATAKFCATTFRAS

SEQ ID NO: 7304 - protein, 15 aa, synthetic construct
LSATVKYCATISRAS

SEQ ID NO: 7305 - protein, 15 aa, synthetic construct
LSCYCCSGPLPFPSW

SEQ ID NO: 7306 - protein, 15 aa, synthetic construct
LSSFPRPHGPWTRSR

SEQ ID NO: 7307 - protein, 15 aa, synthetic construct
LVEENPLLDRGSFAG

SEQ ID NO: 7308 - protein, 15 aa, synthetic construct
LVGDPRGVVAPVGAP

SEQ ID NO: 7309 - protein, 15 aa, synthetic construct
LVPSEAAHREETQGE

SEQ ID NO: 7310 - protein, 15 aa, synthetic construct
LVQDPERPHQEADER

SEQ ID NO: 7311 - protein, 15 aa, synthetic construct
LWRGEEPPPEAGAGE

SEQ ID NO: 7312 - protein, 15 aa, synthetic construct
MASASSSSCSCCRRR

SEQ ID NO: 7313 - protein, 15 aa, synthetic construct
MATASSPPRRPRRAR

SEQ ID NO: 7314 - protein, 15 aa, synthetic construct
MRRPPAVRESPFAAG

SEQ ID NO: 7315 - protein, 15 aa, synthetic construct
NCTKASILYSGMHPC

SEQ ID NO: 7316 - protein, 15 aa, synthetic construct
NDEDQPDNPEGIHSC

SEQ ID NO: 7317 - protein, 15 aa, synthetic construct
NFPVDQAPRDSQGSR

SEQ ID NO: 7318 - protein, 15 aa, synthetic construct
NHEPGRQRRRAMLPL

SEQ ID NO: 7319 - protein, 15 aa, synthetic construct
PAAASPAAPSPVAVS

SEQ ID NO: 7320 - protein, 15 aa, synthetic construct
PAASRAVRHRRPGAL

SEQ ID NO: 7321 - protein, 15 aa, synthetic construct
PADAAAAAVGPGLGE

SEQ ID NO: 7322 - protein, 15 aa, synthetic construct
PADLQPVAGTGRQRE

SEQ ID NO: 7323 - protein, 15 aa, synthetic construct
PAGALPRARGGAGPH

SEQ ID NO: 7324 - protein, 15 aa, synthetic construct
PAPELLLRGCGPEPL

SEQ ID NO: 7325 - protein, 15 aa, synthetic construct
PAQGRLRPHEFWLLQ

SEQ ID NO: 7326 - protein, 15 aa, synthetic construct
PASARNPTPASVSAA

SEQ ID NO: 7327 - protein, 15 aa, synthetic construct
PAVGDVAPAAVCLSA

SEQ ID NO: 7328 - protein, 15 aa, synthetic construct
PAWLQEARDCELRGR

SEQ ID NO: 7329 - protein, 15 aa, synthetic construct
PCVGSGWVGGACPET

SEQ ID NO: 7330 - protein, 15 aa, synthetic construct
PERGEGPEHRSQAAG

SEQ ID NO: 7331 - protein, 15 aa, synthetic construct
PFNLETELWERKTPS

SEQ ID NO: 7332 - protein, 15 aa, synthetic construct
PFPQPLPVRDQLRVQ

SEQ ID NO: 7333 - protein, 15 aa, synthetic construct
PFPRRRPARVRPGTL

SEQ ID NO: 7334 - protein, 15 aa, synthetic construct
PFTLEAELWKREAPV

SEQ ID NO: 7335 - protein, 15 aa, synthetic construct
PGAAGGRAAPAAKEL

SEQ ID NO: 7336 - protein, 15 aa, synthetic construct
PGAGIPRQAQTCRSC

SEQ ID NO: 7337 - protein, 15 aa, synthetic construct
PGCPRSPGPKEASSR

SEQ ID NO: 7338 - protein, 15 aa, synthetic construct
PGDSVHSVWLWGCAG

SEQ ID NO: 7339 - protein, 15 aa, synthetic construct
PGFLWRLPGPDPARE

SEQ ID NO: 7340 - protein, 15 aa, synthetic construct
PGGGARRRCWRSSGR

SEQ ID NO: 7341 - protein, 15 aa, synthetic construct
PGHGRQQERPDGAAQ

SEQ ID NO: 7342 - protein, 15 aa, synthetic construct
PGQPVCLHGRSRGGG

SEQ ID NO: 7343 - protein, 15 aa, synthetic construct
PGRSKGSGRGQAQAA

SEQ ID NO: 7344 - protein, 15 aa, synthetic construct
PGSLPAVGGQQSSGQ

SEQ ID NO: 7345 - protein, 15 aa, synthetic construct
PHPPAELGGAPRRPR

SEQ ID NO: 7346 - protein, 15 aa, synthetic construct
PHPPRQAWRSLWMEL

SEQ ID NO: 7347 - protein, 15 aa, synthetic construct
PHRRLRHGGGRGARL

SEQ ID NO: 7348 - protein, 15 aa, synthetic construct
PIHDSRGASQRLTGG

SEQ ID NO: 7349 - protein, 15 aa, synthetic construct
PIPDSGGPTSPICYI

SEQ ID NO: 7350 - protein, 15 aa, synthetic construct
PIPDSRGPTSPICYI

SEQ ID NO: 7351 - protein, 15 aa, synthetic construct
PIPPSAASVSTTFWE

SEQ ID NO: 7352 - protein, 15 aa, synthetic construct
PITESRRPAAREAVA

SEQ ID NO: 7353 - protein, 15 aa, synthetic construct
PLAAAAGLGEDPVRA

SEQ ID NO: 7354 - protein, 15 aa, synthetic construct
PLAARARARAPLAAK

SEQ ID NO: 7355 - protein, 15 aa, synthetic construct
PLAEWENPLSDWSGS

SEQ ID NO: 7356 - protein, 15 aa, synthetic construct
PLAGGCGAASVSLGR

SEQ ID NO: 7357 - protein, 15 aa, synthetic construct
PLAHAVPDLPSLRGQ

SEQ ID NO: 7358 - protein, 15 aa, synthetic construct
PLAPARSPRTEDSAG

SEQ ID NO: 7359 - protein, 15 aa, synthetic construct
PLASQEAAAQDQPDL

SEQ ID NO: 7360 - protein, 15 aa, synthetic construct
PLCPGPQGPAAGLGA

SEQ ID NO: 7361 - protein, 15 aa, synthetic construct
PLCSCGPLGSVANAG

SEQ ID NO: 7362 - protein, 15 aa, synthetic construct
PLCSPPSPAPRGRPG

SEQ ID NO: 7363 - protein, 15 aa, synthetic construct
PLDQGRPWQPTGVPE

SEQ ID NO: 7364 - protein, 15 aa, synthetic construct
PLEADAAGRHFPGCT

SEQ ID NO: 7365 - protein, 15 aa, synthetic construct
PLEEAARRWRDCPTG

SEQ ID NO: 7366 - protein, 15 aa, synthetic construct
PLERLPAAHPGSLRG

SEQ ID NO: 7367 - protein, 15 aa, synthetic construct
PLERSSLPVLPAGLT

SEQ ID NO: 7368 - protein, 15 aa, synthetic construct
PLFRSPEPGNTRDTR

SEQ ID NO: 7369 - protein, 15 aa, synthetic construct
PLGAPGRLGGPAAYG

SEQ ID NO: 7370 - protein, 15 aa, synthetic construct
PLGSLGVHGVQGESW

SEQ ID NO: 7371 - protein, 15 aa, synthetic construct
PLHIPGHHHWKCPHY

SEQ ID NO: 7372 - protein, 15 aa, synthetic construct
PLHPGPAAAHHPARR

SEQ ID NO: 7373 - protein, 15 aa, synthetic construct
PLHPHTAPGQPAPDR

SEQ ID NO: 7374 - protein, 15 aa, synthetic construct
PLHVPSHFHREPAHH

SEQ ID NO: 7375 - protein, 15 aa, synthetic construct
PLKAEPHISRFPPYP

SEQ ID NO: 7376 - protein, 15 aa, synthetic construct
PLLDLPDQQAPAAER

SEQ ID NO: 7377 - protein, 15 aa, synthetic construct
PLLPAPLRPADPLQH

SEQ ID NO: 7378 - protein, 15 aa, synthetic construct
PLLPASLRPADPLQH

SEQ ID NO: 7379 - protein, 15 aa, synthetic construct
PLLSGESGTLGRRGK

SEQ ID NO: 7380 - protein, 15 aa, synthetic construct
PLNAFPPQHALWPLS

SEQ ID NO: 7381 - protein, 15 aa, synthetic construct
PLNAFRPQHALWPLS

SEQ ID NO: 7382 - protein, 15 aa, synthetic construct
PLNHSGENLADHPLH

SEQ ID NO: 7383 - protein, 15 aa, synthetic construct
PLPAAGRRTPCPLQR

SEQ ID NO: 7384 - protein, 15 aa, synthetic construct
PLPAQEPERLHLQAL

SEQ ID NO: 7385 - protein, 15 aa, synthetic construct
PLPAQPHSPAAAALR

SEQ ID NO: 7386 - protein, 15 aa, synthetic construct
PLPARQRPAQPQRPP

SEQ ID NO: 7387 - protein, 15 aa, synthetic construct
PLPGDGQCTLRGLHG

SEQ ID NO: 7388 - protein, 15 aa, synthetic construct
PLPGEAAAGAGEGGP

SEQ ID NO: 7389 - protein, 15 aa, synthetic construct
PLPGGPTGPVVPQPS

SEQ ID NO: 7390 - protein, 15 aa, synthetic construct
PLPGPRGVTGRDFCR

SEQ ID NO: 7391 - protein, 15 aa, synthetic construct
PLPGTPSPGGVLRLG

SEQ ID NO: 7392 - protein, 15 aa, synthetic construct
PLPLAARNRGTDPPG

SEQ ID NO: 7393 - protein, 15 aa, synthetic construct
PLPNRPRASASRPSR

SEQ ID NO: 7394 - protein, 15 aa, synthetic construct
PLPPRAQPGAGAETR

SEQ ID NO: 7395 - protein, 15 aa, synthetic construct
PLPRAALPRLRPHRR

SEQ ID NO: 7396 - protein, 15 aa, synthetic construct
PLPRAPHHLPLHVLL

SEQ ID NO: 7397 - protein, 15 aa, synthetic construct
PLPRGAAAGHVRAAP

SEQ ID NO: 7398 - protein, 15 aa, synthetic construct
PLPRLPAGGRRALHA

SEQ ID NO: 7399 - protein, 15 aa, synthetic construct
PLPRPAAWPPSPPRG

SEQ ID NO: 7400 - protein, 15 aa, synthetic construct
PLPVRPRGSAPRRGR

SEQ ID NO: 7401 - protein, 15 aa, synthetic construct
PLPVVAARLRAPSQE

SEQ ID NO: 7402 - protein, 15 aa, synthetic construct
PLPWAPRPTTRPRCW

SEQ ID NO: 7403 - protein, 15 aa, synthetic construct
PLPWARRPPTRPRCW

SEQ ID NO: 7404 - protein, 15 aa, synthetic construct
PLRPADPLQHHLQDL

SEQ ID NO: 7405 - protein, 15 aa, synthetic construct
PLSDAQRGPPRPLPG

SEQ ID NO: 7406 - protein, 15 aa, synthetic construct
PLSDGRAAGPGAAPG

SEQ ID NO: 7407 - protein, 15 aa, synthetic construct
PLSQESPRSSPDPGA

SEQ ID NO: 7408 - protein, 15 aa, synthetic construct
PLSRPEDGQLGLEHR

SEQ ID NO: 7409 - protein, 15 aa, synthetic construct
PLSVSSHSDQQCLHY

SEQ ID NO: 7410 - protein, 15 aa, synthetic construct
PLTPRNPISSCNQPG

SEQ ID NO: 7411 - protein, 15 aa, synthetic construct
PLTQVPPKELSTVSA

SEQ ID NO: 7412 - protein, 15 aa, synthetic construct
PLTSCPPAAASGSSS

SEQ ID NO: 7413 - protein, 15 aa, synthetic construct
PLWVPGAIGSPSQEA

SEQ ID NO: 7414 - protein, 15 aa, synthetic construct
PLYLSAPEPQSSFRP

SEQ ID NO: 7415 - protein, 15 aa, synthetic construct
PMGPRAAAGALGPPP

SEQ ID NO: 7416 - protein, 15 aa, synthetic construct
PPAAGGPLQPPAQAP

SEQ ID NO: 7417 - protein, 15 aa, synthetic construct
PPAEPDAGRPPPAAA

SEQ ID NO: 7418 - protein, 15 aa, synthetic construct
PPAVWLRAPSRPSGN

SEQ ID NO: 7419 - protein, 15 aa, synthetic construct
PPPGRSRLLPGPYRA

SEQ ID NO: 7420 - protein, 15 aa, synthetic construct
PPPHGRAAALSAAAG

SEQ ID NO: 7421 - protein, 15 aa, synthetic construct
PPPPPPPAAAPGGGR

SEQ ID NO: 7422 - protein, 15 aa, synthetic construct
PPSAGCSESRDGPTW

SEQ ID NO: 7423 - protein, 15 aa, synthetic construct
PPTRAGGPGGRPGAG

SEQ ID NO: 7424 - protein, 15 aa, synthetic construct
PQPGPAGRAAAARCA

SEQ ID NO: 7425 - protein, 15 aa, synthetic construct
PRAGAAGPAGGPGGA

SEQ ID NO: 7426 - protein, 15 aa, synthetic construct
PRAQAGAAAEEAADR

SEQ ID NO: 7427 - protein, 15 aa, synthetic construct
PRAREIQRLQVCQQP

SEQ ID NO: 7428 - protein, 15 aa, synthetic construct
PRASPASYCCASPPA

SEQ ID NO: 7429 - protein, 15 aa, synthetic construct
PRCSCCAAPTPARSA

SEQ ID NO: 7430 - protein, 15 aa, synthetic construct
PRGAAARPGSAGAGR

SEQ ID NO: 7431 - protein, 15 aa, synthetic construct
PRGAARRHEGPGRHQ

SEQ ID NO: 7432 - protein, 15 aa, synthetic construct
PRGERRADPLPGRGG

SEQ ID NO: 7433 - protein, 15 aa, synthetic construct
PRLAGRLCADAAWNI

SEQ ID NO: 7434 - protein, 15 aa, synthetic construct
PRPGQRSPGESSGVL

SEQ ID NO: 7435 - protein, 15 aa, synthetic construct
PRRGLEHRPAQGHTA

SEQ ID NO: 7436 - protein, 15 aa, synthetic construct
PRRRRPRGAAPRRWS

SEQ ID NO: 7437 - protein, 15 aa, synthetic construct
PRSPGAATAAAAPAA

SEQ ID NO: 7438 - protein, 15 aa, synthetic construct
PRVSAARPTASSWPC

SEQ ID NO: 7439 - protein, 15 aa, synthetic construct
PRVSPGGEAPAGPQL

SEQ ID NO: 7440 - protein, 15 aa, synthetic construct
PSARTGWTRRRRPLR

SEQ ID NO: 7441 - protein, 15 aa, synthetic construct
PSLPSGALLVAGVSS

SEQ ID NO: 7442 - protein, 15 aa, synthetic construct
PSPPSDAWHGVEALS

SEQ ID NO: 7443 - protein, 15 aa, synthetic construct
PSRAPSAPTTAGSAP

SEQ ID NO: 7444 - protein, 15 aa, synthetic construct
PSTWNTKSGWGSSAR

SEQ ID NO: 7445 - protein, 15 aa, synthetic construct
PSVSRRCYCCCCSGR

SEQ ID NO: 7446 - protein, 15 aa, synthetic construct
PSVTEKCCGITSKAS

SEQ ID NO: 7447 - protein, 15 aa, synthetic construct
PTTRAIAPPPATWPS

SEQ ID NO: 7448 - protein, 15 aa, synthetic construct
PTVYHVQHCYYRELR

SEQ ID NO: 7449 - protein, 15 aa, synthetic construct
PVAERGVRRAAEDHP

SEQ ID NO: 7450 - protein, 15 aa, synthetic construct
PVAGGAGEGVRQSFC

SEQ ID NO: 7451 - protein, 15 aa, synthetic construct
PVAHAQRAARLGTRA

SEQ ID NO: 7452 - protein, 15 aa, synthetic construct
PVDPPCPLRIPSLLP

SEQ ID NO: 7453 - protein, 15 aa, synthetic construct
PVGAAVAGGGGLVPV

SEQ ID NO: 7454 - protein, 15 aa, synthetic construct
PVGAPGPAWSASLSA

SEQ ID NO: 7455 - protein, 15 aa, synthetic construct
PVGASGPGARHALPA

SEQ ID NO: 7456 - protein, 15 aa, synthetic construct
PVGRGRPALEEPVPD

SEQ ID NO: 7457 - protein, 15 aa, synthetic construct
PVGTQSGHRPGPREG

SEQ ID NO: 7458 - protein, 15 aa, synthetic construct
PVGVCGPPGRKAGPL

SEQ ID NO: 7459 - protein, 15 aa, synthetic construct
PVHGAPVSAVPLEPV

SEQ ID NO: 7460 - protein, 15 aa, synthetic construct
PVHVPGHCAREPAHH

SEQ ID NO: 7461 - protein, 15 aa, synthetic construct
PVHVPGHNAGEPAHH

SEQ ID NO: 7462 - protein, 15 aa, synthetic construct
PVKELSRAGAPPGVR

SEQ ID NO: 7463 - protein, 15 aa, synthetic construct
PVLEWLAAGPGCPPS

SEQ ID NO: 7464 - protein, 15 aa, synthetic construct
PVLVPDPGARQRSPG

SEQ ID NO: 7465 - protein, 15 aa, synthetic construct
PVQPLCPEGLVKGGH

SEQ ID NO: 7466 - protein, 15 aa, synthetic construct
PVQPVWASGAPGGAG

SEQ ID NO: 7467 - protein, 15 aa, synthetic construct
PVRGAARGGDARVRG

SEQ ID NO: 7468 - protein, 15 aa, synthetic construct
PVRLHGGPAGAHHHR

SEQ ID NO: 7469 - protein, 15 aa, synthetic construct
PVSAQPHGSDNLPHS

SEQ ID NO: 7470 - protein, 15 aa, synthetic construct
PVSATTRSTAPSARA

SEQ ID NO: 7471 - protein, 15 aa, synthetic construct
PVSLLTADPGLGPPR

SEQ ID NO: 7472 - protein, 15 aa, synthetic construct
PVSLPRGAESGFRLR

SEQ ID NO: 7473 - protein, 15 aa, synthetic construct
PVVGGGPRGFPSPRF

SEQ ID NO: 7474 - protein, 15 aa, synthetic construct
QAEEAVPAEAERGGG

SEQ ID NO: 7475 - protein, 15 aa, synthetic construct
QAGGRAAASPGPKEC

SEQ ID NO: 7476 - protein, 15 aa, synthetic construct
QALRGADPAGLGRAG

SEQ ID NO: 7477 - protein, 15 aa, synthetic construct
QALWTLEQACRLHVH

SEQ ID NO: 7478 - protein, 15 aa, synthetic construct
QAPSAGAGRLGGAGA

SEQ ID NO: 7479 - protein, 15 aa, synthetic construct
QAVQDRDAAPGVQLH

SEQ ID NO: 7480 - protein, 15 aa, synthetic construct
QCGGIIWDREGKGPV

SEQ ID NO: 7481 - protein, 15 aa, synthetic construct
QFPLQRGREAPAPPG

SEQ ID NO: 7482 - protein, 15 aa, synthetic construct
QFSDHALLRTRGPSF

SEQ ID NO: 7483 - protein, 15 aa, synthetic construct
QGALAARRQEAAAVG

SEQ ID NO: 7484 - protein, 15 aa, synthetic construct
QGAVRHRAHQLHGQA

SEQ ID NO: 7485 - protein, 15 aa, synthetic construct
QGDAQRGVERARAVP

SEQ ID NO: 7486 - protein, 15 aa, synthetic construct
QGGPSFGSGGRRCGS

SEQ ID NO: 7487 - protein, 15 aa, synthetic construct
QGRLAPATTWGTRSW

SEQ ID NO: 7488 - protein, 15 aa, synthetic construct
QGSARRGLGACGHLY

SEQ ID NO: 7489 - protein, 15 aa, synthetic construct
QGVGEPGTRAGSGRH

SEQ ID NO: 7490 - protein, 15 aa, synthetic construct
QHLLQHVAPGGHQHR

SEQ ID NO: 7491 - protein, 15 aa, synthetic construct
QLPEHRPDWSSPEDK

SEQ ID NO: 7492 - protein, 15 aa, synthetic construct
QPGRAHPLHPGLQGH

SEQ ID NO: 7493 - protein, 15 aa, synthetic construct
QPPAPLDSTSVCSPI

SEQ ID NO: 7494 - protein, 15 aa, synthetic construct
QPTTTHPHVLSAGKF

SEQ ID NO: 7495 - protein, 15 aa, synthetic construct
QQRQDQLRQKQVKCL

SEQ ID NO: 7496 - protein, 15 aa, synthetic construct
QQWCGRQRQTPSVQQ

SEQ ID NO: 7497 - protein, 15 aa, synthetic construct
QRGAGGRRCPERPRQ

SEQ ID NO: 7498 - protein, 15 aa, synthetic construct
QRLAAPGHQGRRHHH

SEQ ID NO: 7499 - protein, 15 aa, synthetic construct
QRPGQSHHPQLRGLH

SEQ ID NO: 7500 - protein, 15 aa, synthetic construct
RAAGDRSAGGAEEAE

SEQ ID NO: 7501 - protein, 15 aa, synthetic construct
RAAVLPCRGQCQGRR

SEQ ID NO: 7502 - protein, 15 aa, synthetic construct
RAGGSSSLDLHPLLC

SEQ ID NO: 7503 - protein, 15 aa, synthetic construct
RAPGQRAAAGRLGRR

SEQ ID NO: 7504 - protein, 15 aa, synthetic construct
RAPLAWSRAGRPVPP

SEQ ID NO: 7505 - protein, 15 aa, synthetic construct
RAPRGQPWKWAQLRQ

SEQ ID NO: 7506 - protein, 15 aa, synthetic construct
RASAPAPSGRDPRLC

SEQ ID NO: 7507 - protein, 15 aa, synthetic construct
RCCPDCTGRRSKTNI

SEQ ID NO: 7508 - protein, 15 aa, synthetic construct
RDGRLQPGRVPAQER

SEQ ID NO: 7509 - protein, 15 aa, synthetic construct
REHQVADLEQTAAQG

SEQ ID NO: 7510 - protein, 15 aa, synthetic construct
RFPLIPPAAAEGAGA

SEQ ID NO: 7511 - protein, 15 aa, synthetic construct
RGAVALVGDPRVAVV

SEQ ID NO: 7512 - protein, 15 aa, synthetic construct
RGAVAPVEAARGAVA

SEQ ID NO: 7513 - protein, 15 aa, synthetic construct
RGCHQPPDQPRALCV

SEQ ID NO: 7514 - protein, 15 aa, synthetic construct
RGDLRQHLRHPSAEQ

SEQ ID NO: 7515 - protein, 15 aa, synthetic construct
RGDQAAAGGRRVGPR

SEQ ID NO: 7516 - protein, 15 aa, synthetic construct
RGGAGPGSGRSGRGG

SEQ ID NO: 7517 - protein, 15 aa, synthetic construct
RGGEPVAERVGAGPE

SEQ ID NO: 7518 - protein, 15 aa, synthetic construct
RGGLGAPRGTRGPRR

SEQ ID NO: 7519 - protein, 15 aa, synthetic construct
RGGSRLRCPARTSPA

SEQ ID NO: 7520 - protein, 15 aa, synthetic construct
RGLAFPAKPRHAGAA

SEQ ID NO: 7521 - protein, 15 aa, synthetic construct
RGPQRARGLWRELEE

SEQ ID NO: 7522 - protein, 15 aa, synthetic construct
RGRRGSPTPFPEVSA

SEQ ID NO: 7523 - protein, 15 aa, synthetic construct
RGSERAWRTWTGRRS

SEQ ID NO: 7524 - protein, 15 aa, synthetic construct
RGWQQGGAEGGSWLP

SEQ ID NO: 7525 - protein, 15 aa, synthetic construct
RGWYPSATTARARCS

SEQ ID NO: 7526 - protein, 15 aa, synthetic construct
RHCGVGSTTTSTGES

SEQ ID NO: 7527 - protein, 15 aa, synthetic construct
RHEDGRRALPPGSSA

SEQ ID NO: 7528 - protein, 15 aa, synthetic construct
RHGGALALPESHVPL

SEQ ID NO: 7529 - protein, 15 aa, synthetic construct
RIRPRGPDHSLAGPA

SEQ ID NO: 7530 - protein, 15 aa, synthetic construct
RISFTTCGTVPDPGS

SEQ ID NO: 7531 - protein, 15 aa, synthetic construct
RLRPPQGAARRKPGD

SEQ ID NO: 7532 - protein, 15 aa, synthetic construct
RNAAGQFTLWGPHDP

SEQ ID NO: 7533 - protein, 15 aa, synthetic construct
RPGALAHAVAAGVFV

SEQ ID NO: 7534 - protein, 15 aa, synthetic construct
RPGLLLRGGGRGPAL

SEQ ID NO: 7535 - protein, 15 aa, synthetic construct
RPLWGPCSPCSGNLS

SEQ ID NO: 7536 - protein, 15 aa, synthetic construct
RPRGRTCQTRVPVFG

SEQ ID NO: 7537 - protein, 15 aa, synthetic construct
RQGGRAGRAASAAEA

SEQ ID NO: 7538 - protein, 15 aa, synthetic construct
RRALSGRPGLRHCLC

SEQ ID NO: 7539 - protein, 15 aa, synthetic construct
RRAVRTAGPGAARPG

SEQ ID NO: 7540 - protein, 15 aa, synthetic construct
RRDHLVLRGGRREAP

SEQ ID NO: 7541 - protein, 15 aa, synthetic construct
RRGDPAAAPTASWRR

SEQ ID NO: 7542 - protein, 15 aa, synthetic construct
RRQLTSPLAPPRRAA

SEQ ID NO: 7543 - protein, 15 aa, synthetic construct
RRRPRGGGPRPGAAE

SEQ ID NO: 7544 - protein, 15 aa, synthetic construct
RRRRGPRGGGATAAG

SEQ ID NO: 7545 - protein, 15 aa, synthetic construct
RRTQTPWKPQPGSGT

SEQ ID NO: 7546 - protein, 15 aa, synthetic construct
RRVGPVVRLLRGPGG

SEQ ID NO: 7547 - protein, 15 aa, synthetic construct
RSQEPGRLGLCAAGN

SEQ ID NO: 7548 - protein, 15 aa, synthetic construct
RSRRGFWPGGADAAG

SEQ ID NO: 7549 - protein, 15 aa, synthetic construct
RSSAPRWPLEASWTL

SEQ ID NO: 7550 - protein, 15 aa, synthetic construct
RTPSASSATPPRTRW

SEQ ID NO: 7551 - protein, 15 aa, synthetic construct
RTSALGQRIALTPHS

SEQ ID NO: 7552 - protein, 15 aa, synthetic construct
RVARLPQSPVWSQCC

SEQ ID NO: 7553 - protein, 15 aa, synthetic construct
RVEEVGVAEAASGEP

SEQ ID NO: 7554 - protein, 15 aa, synthetic construct
RVGEDQHEVDNLRQL

SEQ ID NO: 7555 - protein, 15 aa, synthetic construct
SALERGPPSRGEERR

SEQ ID NO: 7556 - protein, 15 aa, synthetic construct
SALRRMPGHSSRRWQ

SEQ ID NO: 7557 - protein, 15 aa, synthetic construct
SAPAHVPAGAPSARS

SEQ ID NO: 7558 - protein, 15 aa, synthetic construct
SAPDPAPAAAAAPAP

SEQ ID NO: 7559 - protein, 15 aa, synthetic construct
SAPGSVPRAVRARVR

SEQ ID NO: 7560 - protein, 15 aa, synthetic construct
SASAPRRAGVSEPRR

SEQ ID NO: 7561 - protein, 15 aa, synthetic construct
SASRRPPGPQICLRR

SEQ ID NO: 7562 - protein, 15 aa, synthetic construct
SCHSRAGGFDAGSRV

SEQ ID NO: 7563 - protein, 15 aa, synthetic construct
SERYPLRVALGPFTE

SEQ ID NO: 7564 - protein, 15 aa, synthetic construct
SGPGGHPRGGPSACA

SEQ ID NO: 7565 - protein, 15 aa, synthetic construct
SGQPLLTAPLPCLAG

SEQ ID NO: 7566 - protein, 15 aa, synthetic construct
SGRAAAAPAACHLRR

SEQ ID NO: 7567 - protein, 15 aa, synthetic construct
SGTQPLRPQPHPTAA

SEQ ID NO: 7568 - protein, 15 aa, synthetic construct
SHHRHCQCLGGSGQR

SEQ ID NO: 7569 - protein, 15 aa, synthetic construct
SLPAAAAAHPAAGRA

SEQ ID NO: 7570 - protein, 15 aa, synthetic construct
SPAAVPQAVGHPVAN

SEQ ID NO: 7571 - protein, 15 aa, synthetic construct
SPHQSAPVCVAERAG

SEQ ID NO: 7572 - protein, 15 aa, synthetic construct
SPLRSSNGGEKREKP

SEQ ID NO: 7573 - protein, 15 aa, synthetic construct
SPRRGPGRSGSQDSP

SEQ ID NO: 7574 - protein, 15 aa, synthetic construct
SPSWPAPLPGSPGPQ

SEQ ID NO: 7575 - protein, 15 aa, synthetic construct
SPWPAASWRRPWPCA

SEQ ID NO: 7576 - protein, 15 aa, synthetic construct
SQRAGRGRGVRPGPG

SEQ ID NO: 7577 - protein, 15 aa, synthetic construct
SQSQGHRARPWHASR

SEQ ID NO: 7578 - protein, 15 aa, synthetic construct
SRPRARPTRPLGPTV

SEQ ID NO: 7579 - protein, 15 aa, synthetic construct
SRRGASKTPRGPGGS

SEQ ID NO: 7580 - protein, 15 aa, synthetic construct
SSPTTCRASSTWAAS

SEQ ID NO: 7581 - protein, 15 aa, synthetic construct
SSRAPPPLVPAPSPS

SEQ ID NO: 7582 - protein, 15 aa, synthetic construct
SSTTGTPTGWTCSRS

SEQ ID NO: 7583 - protein, 15 aa, synthetic construct
STNSPSACLGARRRW

SEQ ID NO: 7584 - protein, 15 aa, synthetic construct
SVGRAWCASGPRRTG

SEQ ID NO: 7585 - protein, 15 aa, synthetic construct
SVPELAETLCPGSHP

SEQ ID NO: 7586 - protein, 15 aa, synthetic construct
SWTALCKMNETSKAR

SEQ ID NO: 7587 - protein, 15 aa, synthetic construct
SYISGGAVGWGSPAA

SEQ ID NO: 7588 - protein, 15 aa, synthetic construct
TAGPPAWPPRAGRAP

SEQ ID NO: 7589 - protein, 15 aa, synthetic construct
TARRRRPGPKTWPAG

SEQ ID NO: 7590 - protein, 15 aa, synthetic construct
TASCRGSSPPCCSPG

SEQ ID NO: 7591 - protein, 15 aa, synthetic construct
TCGPAGPRAAAAGPG

SEQ ID NO: 7592 - protein, 15 aa, synthetic construct
THRDRVYSPGIPWLL

SEQ ID NO: 7593 - protein, 15 aa, synthetic construct
TLLGWGSHCRDEAAS

SEQ ID NO: 7594 - protein, 15 aa, synthetic construct
TLTPPWSRPTSTRRS

SEQ ID NO: 7595 - protein, 15 aa, synthetic construct
TRCHRACSPSCLRPG

SEQ ID NO: 7596 - protein, 15 aa, synthetic construct
TRGRGLPGPLPAGIE

SEQ ID NO: 7597 - protein, 15 aa, synthetic construct
TRPRRATISTRSTNR

SEQ ID NO: 7598 - protein, 15 aa, synthetic construct
TSAAAVAAVAAVAAG

SEQ ID NO: 7599 - protein, 15 aa, synthetic construct
TSTSARPRSAVSSRK

SEQ ID NO: 7600 - protein, 15 aa, synthetic construct
TTGALKESSGDPCAR

SEQ ID NO: 7601 - protein, 15 aa, synthetic construct
TWCTGPPARRSLWGQ

SEQ ID NO: 7602 - protein, 15 aa, synthetic construct
VCPWPGYRHRPGHHL

SEQ ID NO: 7603 - protein, 15 aa, synthetic construct
VCVQPGPGLQGRRRP

SEQ ID NO: 7604 - protein, 15 aa, synthetic construct
VELAAQVPPRRRGWR

SEQ ID NO: 7605 - protein, 15 aa, synthetic construct
VFTKAPATQQQWQFG

SEQ ID NO: 7606 - protein, 15 aa, synthetic construct
VGAAHGPGAESAGAA

SEQ ID NO: 7607 - protein, 15 aa, synthetic construct
VGDLPEAGGLQIQEG

SEQ ID NO: 7608 - protein, 15 aa, synthetic construct
VGFLSPGNCPGCEQE

SEQ ID NO: 7609 - protein, 15 aa, synthetic construct
VGGGGGGGSGGAAGP

SEQ ID NO: 7610 - protein, 15 aa, synthetic construct
VGGSKEGRREEAGFL

SEQ ID NO: 7611 - protein, 15 aa, synthetic construct
VGPAGPRAQWKKGTG

SEQ ID NO: 7612 - protein, 15 aa, synthetic construct
VGPCGRKAFRHLLGP

SEQ ID NO: 7613 - protein, 15 aa, synthetic construct
VGPDPEEQGRGPAQT

SEQ ID NO: 7614 - protein, 15 aa, synthetic construct
VGPPPKWVPPPYLVT

SEQ ID NO: 7615 - protein, 15 aa, synthetic construct
VHALPPEPGPREAGP

SEQ ID NO: 7616 - protein, 15 aa, synthetic construct
VHGVSAHQPQAPRPA

SEQ ID NO: 7617 - protein, 15 aa, synthetic construct
VLEQWSLRRERSGCK

SEQ ID NO: 7618 - protein, 15 aa, synthetic construct
VLHVEEGSAGGDPLP

SEQ ID NO: 7619 - protein, 15 aa, synthetic construct
VRAHRAVRDGLLHRE

SEQ ID NO: 7620 - protein, 15 aa, synthetic construct
VRRPAAAGPGAAGGV

SEQ ID NO: 7621 - protein, 15 aa, synthetic construct
VRVQSGTHRLLGREN

SEQ ID NO: 7622 - protein, 15 aa, synthetic construct
VSAADSQLGAARLLA

SEQ ID NO: 7623 - protein, 15 aa, synthetic construct
VSALRGLVPAGGGAL

SEQ ID NO: 7624 - protein, 15 aa, synthetic construct
VSAQPCPAAPQGEGL

SEQ ID NO: 7625 - protein, 15 aa, synthetic construct
VSAVEPRFKVRSLPQ

SEQ ID NO: 7626 - protein, 15 aa, synthetic construct
VSPQGGLQDSGAAAE

SEQ ID NO: 7627 - protein, 15 aa, synthetic construct
VSQEWLPSGRRHYRC

SEQ ID NO: 7628 - protein, 15 aa, synthetic construct
VVAPAVGAVAPAAVC

SEQ ID NO: 7629 - protein, 15 aa, synthetic construct
VWRGQDQPGRRAARA

SEQ ID NO: 7630 - protein, 15 aa, synthetic construct
VYEMDFSSSADTAEL

SEQ ID NO: 7631 - protein, 15 aa, synthetic construct
VYGHRLPGLHRRRAL

SEQ ID NO: 7632 - protein, 15 aa, synthetic construct
WAAGPVSPRRPRGQA

SEQ ID NO: 7633 - protein, 15 aa, synthetic construct
WAAPAAPSTRPATAA

SEQ ID NO: 7634 - protein, 15 aa, synthetic construct
WAGGPGELGGPRCCC

SEQ ID NO: 7635 - protein, 15 aa, synthetic construct
WAMPPMTPSLRTARR

SEQ ID NO: 7636 - protein, 15 aa, synthetic construct
WAPNRAARPPLTAAR

SEQ ID NO: 7637 - protein, 15 aa, synthetic construct
WAPRDPRPRPPPADA

SEQ ID NO: 7638 - protein, 15 aa, synthetic construct
WAPRKASRSRAGAPR

SEQ ID NO: 7639 - protein, 15 aa, synthetic construct
WAPTAARPRRSWRGP

SEQ ID NO: 7640 - protein, 15 aa, synthetic construct
WASLPTLSCRNLSLP

SEQ ID NO: 7641 - protein, 15 aa, synthetic construct
WATAAAPGAGGQGRG

SEQ ID NO: 7642 - protein, 15 aa, synthetic construct
WATWRAPRGSRESPP

SEQ ID NO: 7643 - protein, 15 aa, synthetic construct
WAVAAAPEAVAPAVG

SEQ ID NO: 7644 - protein, 15 aa, synthetic construct
WCRVPAALPAPQAAP

SEQ ID NO: 7645 - protein, 15 aa, synthetic construct
WCSRPRCCWASCSSP

SEQ ID NO: 7646 - protein, 15 aa, synthetic construct
WCSTSCGPRCLAPPG

SEQ ID NO: 7647 - protein, 15 aa, synthetic construct
WDPPQPLPADCMSPG

SEQ ID NO: 7648 - protein, 15 aa, synthetic construct
WETIVPTKGPKHPSR

SEQ ID NO: 7649 - protein, 15 aa, synthetic construct
WEVSTPVLKMASFWW

SEQ ID NO: 7650 - protein, 15 aa, synthetic construct
WFRAHGELCQAALAP

SEQ ID NO: 7651 - protein, 15 aa, synthetic construct
WGLSTHLPGQSGGQE

SEQ ID NO: 7652 - protein, 15 aa, synthetic construct
WGPPWTSRLKERIKF

SEQ ID NO: 7653 - protein, 15 aa, synthetic construct
WGRCRARWPEPGSSP

SEQ ID NO: 7654 - protein, 15 aa, synthetic construct
WGSRPGRAGVAVLAE

SEQ ID NO: 7655 - protein, 15 aa, synthetic construct
WGVRSGAFSLPAPPS

SEQ ID NO: 7656 - protein, 15 aa, synthetic construct
WHSGQRQRCAWQCPG

SEQ ID NO: 7657 - protein, 15 aa, synthetic construct
WIPPREARRSLEEAR

SEQ ID NO: 7658 - protein, 15 aa, synthetic construct
WKEAASPTLRLTAGT

SEQ ID NO: 7659 - protein, 15 aa, synthetic construct
WLHRPVRDRGGGPGA

SEQ ID NO: 7660 - protein, 15 aa, synthetic construct
WMQVAPSPRNPSPPW

SEQ ID NO: 7661 - protein, 15 aa, synthetic construct
WNNGDRTPRPLRGPG

SEQ ID NO: 7662 - protein, 15 aa, synthetic construct
WPARRRSQGGSCGPS

SEQ ID NO: 7663 - protein, 15 aa, synthetic construct
WPARSPGAAGTAPPR

SEQ ID NO: 7664 - protein, 15 aa, synthetic construct
WPGAAVRAGAPGNQT

SEQ ID NO: 7665 - protein, 15 aa, synthetic construct
WPHSGLPQLGSRRRG

SEQ ID NO: 7666 - protein, 15 aa, synthetic construct
WPLTGSCGGSGGCRL

SEQ ID NO: 7667 - protein, 15 aa, synthetic construct
WPPRSGCTSCGCSTT

SEQ ID NO: 7668 - protein, 15 aa, synthetic construct
WPPWYHPCCGPGPAG

SEQ ID NO: 7669 - protein, 15 aa, synthetic construct
WPRAAGGGKALSEPR

SEQ ID NO: 7670 - protein, 15 aa, synthetic construct
WPRGGRAAAGPSVSR

SEQ ID NO: 7671 - protein, 15 aa, synthetic construct
WPRPPPPPAAAAAVD

SEQ ID NO: 7672 - protein, 15 aa, synthetic construct
WPSRVAAAREPAWAA

SEQ ID NO: 7673 - protein, 15 aa, synthetic construct
WPSSVPVGPWSTTAA

SEQ ID NO: 7674 - protein, 15 aa, synthetic construct
WPVAGAQKSLRGGGL

SEQ ID NO: 7675 - protein, 15 aa, synthetic construct
WQGRSRAGPRTLGAA

SEQ ID NO: 7676 - protein, 15 aa, synthetic construct
WQRHLLQEGRPTKQT

SEQ ID NO: 7677 - protein, 15 aa, synthetic construct
WQRRETATWVPEAGE

SEQ ID NO: 7678 - protein, 15 aa, synthetic construct
WQWPGESEARSQRRR

SEQ ID NO: 7679 - protein, 15 aa, synthetic construct
WRASATRPLREKAAV

SEQ ID NO: 7680 - protein, 15 aa, synthetic construct
WRGSDARSPAATAAP

SEQ ID NO: 7681 - protein, 15 aa, synthetic construct
WRPERTPRRWVSWAP

SEQ ID NO: 7682 - protein, 15 aa, synthetic construct
WRQRCGGPATDSWPP

SEQ ID NO: 7683 - protein, 15 aa, synthetic construct
WRRECCAPAERPGPA

SEQ ID NO: 7684 - protein, 15 aa, synthetic construct
WRTLESTFPALKCST

SEQ ID NO: 7685 - protein, 15 aa, synthetic construct
WSAGCTSVQRPPART

SEQ ID NO: 7686 - protein, 15 aa, synthetic construct
WSCGPGGRRPRAPRR

SEQ ID NO: 7687 - protein, 15 aa, synthetic construct
WSCRHGPAAGARLPD

SEQ ID NO: 7688 - protein, 15 aa, synthetic construct
WSGPGELRTASRAGP

SEQ ID NO: 7689 - protein, 15 aa, synthetic construct
WSGRPGPSPIPRERG

SEQ ID NO: 7690 - protein, 15 aa, synthetic construct
WSIASWGPGRTELPG

SEQ ID NO: 7691 - protein, 15 aa, synthetic construct
WSPAGPRSAAAFWRS

SEQ ID NO: 7692 - protein, 15 aa, synthetic construct
WSPPPRPRYSDSPSS

SEQ ID NO: 7693 - protein, 15 aa, synthetic construct
WSPSWRLRSSLDRGG

SEQ ID NO: 7694 - protein, 15 aa, synthetic construct
WSRRPACPGALTHPP

SEQ ID NO: 7695 - protein, 15 aa, synthetic construct
WSRSAAQQRIAPVGG

SEQ ID NO: 7696 - protein, 15 aa, synthetic construct
WTSSGTCRSPSARRA

SEQ ID NO: 7697 - protein, 15 aa, synthetic construct
WVGPPAPAGSPSRRT

SEQ ID NO: 7698 - protein, 15 aa, synthetic construct
WVWGEGQDVQPWDSG

SEQ ID NO: 7699 - protein, 15 aa, synthetic construct
YYAPGTRGAGVPWSW

SEQ ID NO: 7700 - protein, 15 aa, synthetic construct
AAAAARLLRARAAAS

SEQ ID NO: 7701 - protein, 15 aa, synthetic construct
AAAGSAGGGTHAAAG

SEQ ID NO: 7702 - protein, 15 aa, synthetic construct
AAALPRALPLAQPPH

SEQ ID NO: 7703 - protein, 15 aa, synthetic construct
AAAPCGLSLRPAPGP

SEQ ID NO: 7704 - protein, 15 aa, synthetic construct
AAAPGTRAACCWWSG

SEQ ID NO: 7705 - protein, 15 aa, synthetic construct
AAAPPGLGPRVRPRP

SEQ ID NO: 7706 - protein, 15 aa, synthetic construct
AAAPSCRPLLAPQCA

SEQ ID NO: 7707 - protein, 15 aa, synthetic construct
AAAWGHPAVPAAGGG

SEQ ID NO: 7708 - protein, 15 aa, synthetic construct
AADPVPGTLQPADWH

SEQ ID NO: 7709 - protein, 15 aa, synthetic construct
AAEPAAGVGRRPAWP

SEQ ID NO: 7710 - protein, 15 aa, synthetic construct
AAFPDHPLPLSLLLP

SEQ ID NO: 7711 - protein, 15 aa, synthetic construct
AAGAASAAGALIPLG

SEQ ID NO: 7712 - protein, 15 aa, synthetic construct
AAGALPRHLQLYQGV

SEQ ID NO: 7713 - protein, 15 aa, synthetic construct
AALGAAAAAAAAAPG

SEQ ID NO: 7714 - protein, 15 aa, synthetic construct
AALGGLLGLPGPAGS

SEQ ID NO: 7715 - protein, 15 aa, synthetic construct
AALLPGQEAFQRLQK

SEQ ID NO: 7716 - protein, 15 aa, synthetic construct
AAPAGGSGRGFLRLL

SEQ ID NO: 7717 - protein, 15 aa, synthetic construct
AAPALPPPPPRTMGS

SEQ ID NO: 7718 - protein, 15 aa, synthetic construct
AAPAPGPAGRLPAGL

SEQ ID NO: 7719 - protein, 15 aa, synthetic construct
AAPAPTRTPWTAATA

SEQ ID NO: 7720 - protein, 15 aa, synthetic construct
AAPATAPAPSRPTPD

SEQ ID NO: 7721 - protein, 15 aa, synthetic construct
AAPLGTVPAPTSWRL

SEQ ID NO: 7722 - protein, 15 aa, synthetic construct
AAPPATAACSLVRAQ

SEQ ID NO: 7723 - protein, 15 aa, synthetic construct
AAPPQAVGHSAASPA

SEQ ID NO: 7724 - protein, 15 aa, synthetic construct
AARRSPTAGGATGAS

SEQ ID NO: 7725 - protein, 15 aa, synthetic construct
AASAGPWPGPRPWRS

SEQ ID NO: 7726 - protein, 15 aa, synthetic construct
AASAKRRGRPGHRHH

SEQ ID NO: 7727 - protein, 15 aa, synthetic construct
AASNTAPCGPLSPRQ

SEQ ID NO: 7728 - protein, 15 aa, synthetic construct
AASPAAVSPAAVPQA

SEQ ID NO: 7729 - protein, 15 aa, synthetic construct
AASPLQEGGHPRIPL

SEQ ID NO: 7730 - protein, 15 aa, synthetic construct
AASRGAARAATALPV

SEQ ID NO: 7731 - protein, 15 aa, synthetic construct
AATPASAGLSPTHWG

SEQ ID NO: 7732 - protein, 15 aa, synthetic construct
AAVAATGGAGRGEGA

SEQ ID NO: 7733 - protein, 15 aa, synthetic construct
AAVCLSAAASPCAAV

SEQ ID NO: 7734 - protein, 15 aa, synthetic construct
AEREGGPAPALPRRC

SEQ ID NO: 7735 - protein, 15 aa, synthetic construct
AGAGSTLGLQPGLQR

SEQ ID NO: 7736 - protein, 15 aa, synthetic construct
AGVFVRTPNGFGGPS

SEQ ID NO: 7737 - protein, 15 aa, synthetic construct
AGVPGSHPPSVAGSA

SEQ ID NO: 7738 - protein, 15 aa, synthetic construct
AICPGLVAGAGPRGP

SEQ ID NO: 7739 - protein, 15 aa, synthetic construct
ALVQNQLACPPARRA

SEQ ID NO: 7740 - protein, 15 aa, synthetic construct
ANSKDFPCGTPSRMR

SEQ ID NO: 7741 - protein, 15 aa, synthetic construct
APAAAAAAAAAPGQP

SEQ ID NO: 7742 - protein, 15 aa, synthetic construct
APAAAAALAPPAAAD

SEQ ID NO: 7743 - protein, 15 aa, synthetic construct
APAAAPALRSGAAPG

SEQ ID NO: 7744 - protein, 15 aa, synthetic construct
APAASTAGCRARRRS

SEQ ID NO: 7745 - protein, 15 aa, synthetic construct
APACACWCTGSRRSP

SEQ ID NO: 7746 - protein, 15 aa, synthetic construct
APAGAAARKMPARRG

SEQ ID NO: 7747 - protein, 15 aa, synthetic construct
APAGLVVGAAPAAAA

SEQ ID NO: 7748 - protein, 15 aa, synthetic construct
APAGSWSQSGYPESC

SEQ ID NO: 7749 - protein, 15 aa, synthetic construct
APALKTAPCVRAPRT

SEQ ID NO: 7750 - protein, 15 aa, synthetic construct
APAQHRLVAAPAPAR

SEQ ID NO: 7751 - protein, 15 aa, synthetic construct
APATAAAAAAARNPR

SEQ ID NO: 7752 - protein, 15 aa, synthetic construct
APATCVPETFWHRTA

SEQ ID NO: 7753 - protein, 15 aa, synthetic construct
APCVFWFRGWSSPFP

SEQ ID NO: 7754 - protein, 15 aa, synthetic construct
APEGGGDAPTLLLAG

SEQ ID NO: 7755 - protein, 15 aa, synthetic construct
APERRFSTSSLPKVP

SEQ ID NO: 7756 - protein, 15 aa, synthetic construct
APGAHADPEQPERRR

SEQ ID NO: 7757 - protein, 15 aa, synthetic construct
APGAVAHACNPSTLG

SEQ ID NO: 7758 - protein, 15 aa, synthetic construct
APGHDGALIRPPGHH

SEQ ID NO: 7759 - protein, 15 aa, synthetic construct
APGLAPARAGRAARV

SEQ ID NO: 7760 - protein, 15 aa, synthetic construct
APGPGAEAGPSGQGP

SEQ ID NO: 7761 - protein, 15 aa, synthetic construct
APGPSGSGTGGRGRT

SEQ ID NO: 7762 - protein, 15 aa, synthetic construct
APGQRHIYSRLLGQF

SEQ ID NO: 7763 - protein, 15 aa, synthetic construct
APGRAPGGPGRGPAP

SEQ ID NO: 7764 - protein, 15 aa, synthetic construct
APGRPPVRRPGPRLG

SEQ ID NO: 7765 - protein, 15 aa, synthetic construct
APGSRSGLSGGQEDG

SEQ ID NO: 7766 - protein, 15 aa, synthetic construct
APGTFQEAPAPQQAP

SEQ ID NO: 7767 - protein, 15 aa, synthetic construct
APGTQKTQAPEWRQW

SEQ ID NO: 7768 - protein, 15 aa, synthetic construct
APGTRLPRGPVGGSL

SEQ ID NO: 7769 - protein, 15 aa, synthetic construct
APHSEHVHHRRVPRA

SEQ ID NO: 7770 - protein, 15 aa, synthetic construct
APKEAIQAQTMQTPV

SEQ ID NO: 7771 - protein, 15 aa, synthetic construct
APLEASGGLVGSGAT

SEQ ID NO: 7772 - protein, 15 aa, synthetic construct
APLWLGWRWWRLLLL

SEQ ID NO: 7773 - protein, 15 aa, synthetic construct
APPARAPPNGALPPA

SEQ ID NO: 7774 - protein, 15 aa, synthetic construct
APPCARGPAPASRRR

SEQ ID NO: 7775 - protein, 15 aa, synthetic construct
APPGPHSAPRPPLPV

SEQ ID NO: 7776 - protein, 15 aa, synthetic construct
APPHSWTCRRWRYSS

SEQ ID NO: 7777 - protein, 15 aa, synthetic construct
APPTCTRSASSWASR

SEQ ID NO: 7778 - protein, 15 aa, synthetic construct
APQCGTQERCAGRGS

SEQ ID NO: 7779 - protein, 15 aa, synthetic construct
APRALEPRPREAAAP

SEQ ID NO: 7780 - protein, 15 aa, synthetic construct
APRCCPRCCCCCCGR

SEQ ID NO: 7781 - protein, 15 aa, synthetic construct
APRGLGTRRGGRPGS

SEQ ID NO: 7782 - protein, 15 aa, synthetic construct
APRSLGELLLGGGPH

SEQ ID NO: 7783 - protein, 15 aa, synthetic construct
APRTGSPGPRRRPRQ

SEQ ID NO: 7784 - protein, 15 aa, synthetic construct
APRTSSPPSACGSAL

SEQ ID NO: 7785 - protein, 15 aa, synthetic construct
APRYVPRPRFFHLPW

SEQ ID NO: 7786 - protein, 15 aa, synthetic construct
APSGFTEPATGGCVV

SEQ ID NO: 7787 - protein, 15 aa, synthetic construct
APSQVGQGGSAGHTH

SEQ ID NO: 7788 - protein, 15 aa, synthetic construct
APSSAFWPWQSTDTW

SEQ ID NO: 7789 - protein, 15 aa, synthetic construct
APSSCGRLSAWMSAR

SEQ ID NO: 7790 - protein, 15 aa, synthetic construct
APTARSASPRPAPAS

SEQ ID NO: 7791 - protein, 15 aa, synthetic construct
APTSCSWAARVTCVP

SEQ ID NO: 7792 - protein, 15 aa, synthetic construct
APWPTRCPPRPCLRP

SEQ ID NO: 7793 - protein, 15 aa, synthetic construct
APWRPSAHRYHRGAA

SEQ ID NO: 7794 - protein, 15 aa, synthetic construct
AQQGPDSARAGAAHQ

SEQ ID NO: 7795 - protein, 15 aa, synthetic construct
ARGWGRRQSPGEMAG

SEQ ID NO: 7796 - protein, 15 aa, synthetic construct
AVLVAAPSAAAISPA

SEQ ID NO: 7797 - protein, 15 aa, synthetic construct
AVPQSVGPRGARGHR

SEQ ID NO: 7798 - protein, 15 aa, synthetic construct
CALPAPRRCSSCCSC

SEQ ID NO: 7799 - protein, 15 aa, synthetic construct
CASAFGGRLPAATET

SEQ ID NO: 7800 - protein, 15 aa, synthetic construct
CCCCWAWAAGSRGGR

SEQ ID NO: 7801 - protein, 15 aa, synthetic construct
CCRRGAAGPELPVER

SEQ ID NO: 7802 - protein, 15 aa, synthetic construct
CPCPAGEGDPAWPAL

SEQ ID NO: 7803 - protein, 15 aa, synthetic construct
CPGLGTEAKPRRDGW

SEQ ID NO: 7804 - protein, 15 aa, synthetic construct
CPGSRRRRRRSSSNS

SEQ ID NO: 7805 - protein, 15 aa, synthetic construct
CRACLCSCRCCFCCC

SEQ ID NO: 7806 - protein, 15 aa, synthetic construct
CRPPSLSALSPSASQ

SEQ ID NO: 7807 - protein, 15 aa, synthetic construct
CSCRRRRSSRARCCG

SEQ ID NO: 7808 - protein, 15 aa, synthetic construct
CSDHGFCLQMTELYV

SEQ ID NO: 7809 - protein, 15 aa, synthetic construct
CSPAPCCCARSWRSA

SEQ ID NO: 7810 - protein, 15 aa, synthetic construct
CYRLLDLRMRRRILR

SEQ ID NO: 7811 - protein, 15 aa, synthetic construct
DEAQVEPDPHLRRRR

SEQ ID NO: 7812 - protein, 15 aa, synthetic construct
DGAPHGRARQRRGRA

SEQ ID NO: 7813 - protein, 15 aa, synthetic construct
DGDWNARVSSAVRSV

SEQ ID NO: 7814 - protein, 15 aa, synthetic construct
DGPGQIPPRSRGMPS

SEQ ID NO: 7815 - protein, 15 aa, synthetic construct
DQTEQFIPAIKKEIL

SEQ ID NO: 7816 - protein, 15 aa, synthetic construct
EAAAAAAASEDGGFL

SEQ ID NO: 7817 - protein, 15 aa, synthetic construct
EAAAAGVAAAGGARP

SEQ ID NO: 7818 - protein, 15 aa, synthetic construct
EAAAEALPAAAGARR

SEQ ID NO: 7819 - protein, 15 aa, synthetic construct
EAAAGGSAAGAPAGG

SEQ ID NO: 7820 - protein, 15 aa, synthetic construct
EAAALRREPGARAGS

SEQ ID NO: 7821 - protein, 15 aa, synthetic construct
EAAAWRSWRGGGRRA

SEQ ID NO: 7822 - protein, 15 aa, synthetic construct
EAACPLDGRAAARAS

SEQ ID NO: 7823 - protein, 15 aa, synthetic construct
EAAERAHAGAHRVHL

SEQ ID NO: 7824 - protein, 15 aa, synthetic construct
EAAGAASEADLAAGG

SEQ ID NO: 7825 - protein, 15 aa, synthetic construct
EAAGTDRPAPWCTGG

SEQ ID NO: 7826 - protein, 15 aa, synthetic construct
EAAIWHLPVPALLFC

SEQ ID NO: 7827 - protein, 15 aa, synthetic construct
EAALCHGGSSGAEGP

SEQ ID NO: 7828 - protein, 15 aa, synthetic construct
EAALGADLGIQLLHL

SEQ ID NO: 7829 - protein, 15 aa, synthetic construct
EAALGRAPRGHGPPP

SEQ ID NO: 7830 - protein, 15 aa, synthetic construct
EAALQQEVERRWQPD

SEQ ID NO: 7831 - protein, 15 aa, synthetic construct
EAARQQLAAAAPGGL

SEQ ID NO: 7832 - protein, 15 aa, synthetic construct
EAARSPAAPGGAPGL

SEQ ID NO: 7833 - protein, 15 aa, synthetic construct
EAASGPGEHGQGGAA

SEQ ID NO: 7834 - protein, 15 aa, synthetic construct
EAASGTHPIALHWKL

SEQ ID NO: 7835 - protein, 15 aa, synthetic construct
EAASGTHPTALHWKL

SEQ ID NO: 7836 - protein, 15 aa, synthetic construct
EAAVGRAAAWRPALR

SEQ ID NO: 7837 - protein, 15 aa, synthetic construct
EAAVLGAAAAEAAAA

SEQ ID NO: 7838 - protein, 15 aa, synthetic construct
EAAVWPVAVALLAES

SEQ ID NO: 7839 - protein, 15 aa, synthetic construct
EAAWAYPCARHHEAG

SEQ ID NO: 7840 - protein, 15 aa, synthetic construct
EACAASPVPGGVLPS

SEQ ID NO: 7841 - protein, 15 aa, synthetic construct
EADAEDGSDPGQGLG

SEQ ID NO: 7842 - protein, 15 aa, synthetic construct
EADGPGVCHEDHEQV

SEQ ID NO: 7843 - protein, 15 aa, synthetic construct
EAEAEERVSRLLPGV

SEQ ID NO: 7844 - protein, 15 aa, synthetic construct
EAEDWVHLTQFAGGG

SEQ ID NO: 7845 - protein, 15 aa, synthetic construct
EAEGEAAPAGGGAGA

SEQ ID NO: 7846 - protein, 15 aa, synthetic construct
EAEKRAAVELGRRAP

SEQ ID NO: 7847 - protein, 15 aa, synthetic construct
EAEREHLAGRAAHQA

SEQ ID NO: 7848 - protein, 15 aa, synthetic construct
EAERGGRPRPRAPCP

SEQ ID NO: 7849 - protein, 15 aa, synthetic construct
EAERRGPGGAGGRPL

SEQ ID NO: 7850 - protein, 15 aa, synthetic construct
EAESGADLFHVADAA

SEQ ID NO: 7851 - protein, 15 aa, synthetic construct
EAESGRDGEGAGASG

SEQ ID NO: 7852 - protein, 15 aa, synthetic construct
EAGAAAPCRGRPRGR

SEQ ID NO: 7853 - protein, 15 aa, synthetic construct
EAGAAASRSRLGRPG

SEQ ID NO: 7854 - protein, 15 aa, synthetic construct
EAGAAMGRGARAALG

SEQ ID NO: 7855 - protein, 15 aa, synthetic construct
EAGCAFLGGPAGATG

SEQ ID NO: 7856 - protein, 15 aa, synthetic construct
EAGDPVPERQPQERK

SEQ ID NO: 7857 - protein, 15 aa, synthetic construct
EAGDRTLGLGEPSRG

SEQ ID NO: 7858 - protein, 15 aa, synthetic construct
EAGEEKDPRCSHCAE

SEQ ID NO: 7859 - protein, 15 aa, synthetic construct
EAGEQNPGALGEEGT

SEQ ID NO: 7860 - protein, 15 aa, synthetic construct
EAGEVPRRRSGRGRP

SEQ ID NO: 7861 - protein, 15 aa, synthetic construct
EAGGAGQPVGADGAA

SEQ ID NO: 7862 - protein, 15 aa, synthetic construct
EAGGGLRLEPGAAPT

SEQ ID NO: 7863 - protein, 15 aa, synthetic construct
EAGGGRDVPRGRRAL

SEQ ID NO: 7864 - protein, 15 aa, synthetic construct
EAGGLAAAGAAARPA

SEQ ID NO: 7865 - protein, 15 aa, synthetic construct
EAGLRGAGVGVGQRG

SEQ ID NO: 7866 - protein, 15 aa, synthetic construct
EAGNRATGRAAGRAA

SEQ ID NO: 7867 - protein, 15 aa, synthetic construct
EAGPAPALGVLLPLR

SEQ ID NO: 7868 - protein, 15 aa, synthetic construct
EAGPGRAGPAAAGAV

SEQ ID NO: 7869 - protein, 15 aa, synthetic construct
EAGPGRRRRAPPAVL

SEQ ID NO: 7870 - protein, 15 aa, synthetic construct
EAGPPRHRYLVQGHG

SEQ ID NO: 7871 - protein, 15 aa, synthetic construct
EAGQQRRRLHDRGPG

SEQ ID NO: 7872 - protein, 15 aa, synthetic construct
EAGRARQARRRVRSV

SEQ ID NO: 7873 - protein, 15 aa, synthetic construct
EAGRRGALQRQHRGA

SEQ ID NO: 7874 - protein, 15 aa, synthetic construct
EAGVATAAGGQLAGG

SEQ ID NO: 7875 - protein, 15 aa, synthetic construct
EAGVRPLPPHHLLRR

SEQ ID NO: 7876 - protein, 15 aa, synthetic construct
EAHLRPRGGPAASLG

SEQ ID NO: 7877 - protein, 15 aa, synthetic construct
EAHPACGFDCYHSCN

SEQ ID NO: 7878 - protein, 15 aa, synthetic construct
EAHPGPRGRAVEDRV

SEQ ID NO: 7879 - protein, 15 aa, synthetic construct
EAHSRGARTPPRAAR

SEQ ID NO: 7880 - protein, 15 aa, synthetic construct
EAHTGSAGSPAGPGP

SEQ ID NO: 7881 - protein, 15 aa, synthetic construct
EAKGWISRRGLLPER

SEQ ID NO: 7882 - protein, 15 aa, synthetic construct
EAKRGPWHRLRDGSR

SEQ ID NO: 7883 - protein, 15 aa, synthetic construct
EALFTLRLGWARVAP

SEQ ID NO: 7884 - protein, 15 aa, synthetic construct
EALGSRLALGRAQPR

SEQ ID NO: 7885 - protein, 15 aa, synthetic construct
EALHLQPDHRRIPGA

SEQ ID NO: 7886 - protein, 15 aa, synthetic construct
EALPGGRDAAAAQRG

SEQ ID NO: 7887 - protein, 15 aa, synthetic construct
EALPVGRPGPGAAAP

SEQ ID NO: 7888 - protein, 15 aa, synthetic construct
EALPVPWEPERGGGR

SEQ ID NO: 7889 - protein, 15 aa, synthetic construct
EALQHHRGPIRWGKM

SEQ ID NO: 7890 - protein, 15 aa, synthetic construct
EALQPCSPCTHCSLL

SEQ ID NO: 7891 - protein, 15 aa, synthetic construct
EALRDCPVSPHASSC

SEQ ID NO: 7892 - protein, 15 aa, synthetic construct
EALSPSSCAFAMAFV

SEQ ID NO: 7893 - protein, 15 aa, synthetic construct
EALWEPQEQQETQGP

SEQ ID NO: 7894 - protein, 15 aa, synthetic construct
EAMRRTTTSRSKGTR

SEQ ID NO: 7895 - protein, 15 aa, synthetic construct
EAMTARSSALTTLPQ

SEQ ID NO: 7896 - protein, 15 aa, synthetic construct
EAPACEGGGAAARAA

SEQ ID NO: 7897 - protein, 15 aa, synthetic construct
EAPALLLPGSSGAGL

SEQ ID NO: 7898 - protein, 15 aa, synthetic construct
EAPAQAGAAAAGGRR

SEQ ID NO: 7899 - protein, 15 aa, synthetic construct
EAPAQAPATQRVGPG

SEQ ID NO: 7900 - protein, 15 aa, synthetic construct
EAPFADFDCAAALIP

SEQ ID NO: 7901 - protein, 15 aa, synthetic construct
EAPFSYLCQPHATVP

SEQ ID NO: 7902 - protein, 15 aa, synthetic construct
EAPGDRRPLRHEDPQ

SEQ ID NO: 7903 - protein, 15 aa, synthetic construct
EAPKACPYLQQSSRP

SEQ ID NO: 7904 - protein, 15 aa, synthetic construct
EAPPAASQGKQGRDV

SEQ ID NO: 7905 - protein, 15 aa, synthetic construct
EAPQWHLPDAAALLP

SEQ ID NO: 7906 - protein, 15 aa, synthetic construct
EAPSASVFVLYNIFF

SEQ ID NO: 7907 - protein, 15 aa, synthetic construct
EAPWGLPLPSGGPGG

SEQ ID NO: 7908 - protein, 15 aa, synthetic construct
EAQHHLCTFPAPHLG

SEQ ID NO: 7909 - protein, 15 aa, synthetic construct
EAQKSLCSGNWGPTL

SEQ ID NO: 7910 - protein, 15 aa, synthetic construct
EAQLLPATADLQPQL

SEQ ID NO: 7911 - protein, 15 aa, synthetic construct
EAQPEEDVAPWRKEG

SEQ ID NO: 7912 - protein, 15 aa, synthetic construct
EAQRRAAAAVEAEAL

SEQ ID NO: 7913 - protein, 15 aa, synthetic construct
EARAALRHALRLALY

SEQ ID NO: 7914 - protein, 15 aa, synthetic construct
EARAFPGPFLPGRPL

SEQ ID NO: 7915 - protein, 15 aa, synthetic construct
EARAGAAPPPTGLSA

SEQ ID NO: 7916 - protein, 15 aa, synthetic construct
EARAPARKGAPSLLA

SEQ ID NO: 7917 - protein, 15 aa, synthetic construct
EARASPAARQRPRPD

SEQ ID NO: 7918 - protein, 15 aa, synthetic construct
EARCYWRVRFGRSAA

SEQ ID NO: 7919 - protein, 15 aa, synthetic construct
EARDGSCKNSPGCVD

SEQ ID NO: 7920 - protein, 15 aa, synthetic construct
EARGELREAAAGLLP

SEQ ID NO: 7921 - protein, 15 aa, synthetic construct
EARGPVPALAQRRAQ

SEQ ID NO: 7922 - protein, 15 aa, synthetic construct
EARHSAGSFPEAEAR

SEQ ID NO: 7923 - protein, 15 aa, synthetic construct
EARRAARGEEEGAAR

SEQ ID NO: 7924 - protein, 15 aa, synthetic construct
EARRAPEARGLAPRT

SEQ ID NO: 7925 - protein, 15 aa, synthetic construct
EARRGSVTAGARKRA

SEQ ID NO: 7926 - protein, 15 aa, synthetic construct
EARRSGLLGCLRRRR

SEQ ID NO: 7927 - protein, 15 aa, synthetic construct
EARSAWRSRSGSRTR

SEQ ID NO: 7928 - protein, 15 aa, synthetic construct
EARVLLGRLLQSGRE

SEQ ID NO: 7929 - protein, 15 aa, synthetic construct
EASAAGSDEDEQNLP

SEQ ID NO: 7930 - protein, 15 aa, synthetic construct
EASAASPSGGVCDGP

SEQ ID NO: 7931 - protein, 15 aa, synthetic construct
EASAQREEEDPRHLP

SEQ ID NO: 7932 - protein, 15 aa, synthetic construct
EASGAPAAFPALLPP

SEQ ID NO: 7933 - protein, 15 aa, synthetic construct
EASLPGRGRTRDAAA

SEQ ID NO: 7934 - protein, 15 aa, synthetic construct
EASPELRPGAHGGHG

SEQ ID NO: 7935 - protein, 15 aa, synthetic construct
EASPLGLHCMCCFCK

SEQ ID NO: 7936 - protein, 15 aa, synthetic construct
EASSCFPVISVLPLK

SEQ ID NO: 7937 - protein, 15 aa, synthetic construct
EASSPRVQLLGQRAG

SEQ ID NO: 7938 - protein, 15 aa, synthetic construct
EASVAPASPCVPLEA

SEQ ID NO: 7939 - protein, 15 aa, synthetic construct
EASVGRHPSVDATAG

SEQ ID NO: 7940 - protein, 15 aa, synthetic construct
EATGQGFLYSGVPAA

SEQ ID NO: 7941 - protein, 15 aa, synthetic construct
EATIAPVRHQPSPCG

SEQ ID NO: 7942 - protein, 15 aa, synthetic construct
EATKEAGRLLPSPGL

SEQ ID NO: 7943 - protein, 15 aa, synthetic construct
EATPAPGFCLCHSGC

SEQ ID NO: 7944 - protein, 15 aa, synthetic construct
EATRPLYHQHRRPHG

SEQ ID NO: 7945 - protein, 15 aa, synthetic construct
EATSQAASGPGALSG

SEQ ID NO: 7946 - protein, 15 aa, synthetic construct
EAVGVSPAAHAGPLL

SEQ ID NO: 7947 - protein, 15 aa, synthetic construct
EAVGVSPAGHAGPLL

SEQ ID NO: 7948 - protein, 15 aa, synthetic construct
EAVLHLRAHRPLWDP

SEQ ID NO: 7949 - protein, 15 aa, synthetic construct
EAVQPQRPLQRRGQG

SEQ ID NO: 7950 - protein, 15 aa, synthetic construct
EAWARSPPSGRGPEP

SEQ ID NO: 7951 - protein, 15 aa, synthetic construct
EAWRCRPSAIPTPAS

SEQ ID NO: 7952 - protein, 15 aa, synthetic construct
EAYLRGRAALFLDSV

SEQ ID NO: 7953 - protein, 15 aa, synthetic construct
ECARDAGSDGAGWGG

SEQ ID NO: 7954 - protein, 15 aa, synthetic construct
ECAWGSSLEVASGAS

SEQ ID NO: 7955 - protein, 15 aa, synthetic construct
ECEGHGYSLGCDIVC

SEQ ID NO: 7956 - protein, 15 aa, synthetic construct
ECGGLAGVGAGLEER

SEQ ID NO: 7957 - protein, 15 aa, synthetic construct
ECGSEGDRAEPGAIS

SEQ ID NO: 7958 - protein, 15 aa, synthetic construct
ECGVRWSGADAADAG

SEQ ID NO: 7959 - protein, 15 aa, synthetic construct
ECLCGHRGLRAVPLG

SEQ ID NO: 7960 - protein, 15 aa, synthetic construct
ECLCPEPQQTPGWCL

SEQ ID NO: 7961 - protein, 15 aa, synthetic construct
ECLPALRTVPPWGLG

SEQ ID NO: 7962 - protein, 15 aa, synthetic construct
ECLREEGPDPAEQCL

SEQ ID NO: 7963 - protein, 15 aa, synthetic construct
ECMYSKCTSFFTLSW

SEQ ID NO: 7964 - protein, 15 aa, synthetic construct
ECPRWCSFQVAQGLC

SEQ ID NO: 7965 - protein, 15 aa, synthetic construct
ECQPPVGHQQGAGGG

SEQ ID NO: 7966 - protein, 15 aa, synthetic construct
ECQQRLCQAEEAHPH

SEQ ID NO: 7967 - protein, 15 aa, synthetic construct
ECRGAAGPGPGPGWS

SEQ ID NO: 7968 - protein, 15 aa, synthetic construct
ECRLRSCGHRLGGAD

SEQ ID NO: 7969 - protein, 15 aa, synthetic construct
ECTAEVRFGAVVCRG

SEQ ID NO: 7970 - protein, 15 aa, synthetic construct
ECTGSPGAGRLLGAS

SEQ ID NO: 7971 - protein, 15 aa, synthetic construct
ECTSWSESLDLSATW

SEQ ID NO: 7972 - protein, 15 aa, synthetic construct
ECYRQDGAQSCAGSA

SEQ ID NO: 7973 - protein, 15 aa, synthetic construct
EDAAAERHLQVHHGA

SEQ ID NO: 7974 - protein, 15 aa, synthetic construct
EDAALFQWPKLPRLP

SEQ ID NO: 7975 - protein, 15 aa, synthetic construct
EDAASPAAHSLPERR

SEQ ID NO: 7976 - protein, 15 aa, synthetic construct
EDAEQGAGSGGGRRG

SEQ ID NO: 7977 - protein, 15 aa, synthetic construct
EDAFLYPGVPAAVRR

SEQ ID NO: 7978 - protein, 15 aa, synthetic construct
EDALAKGSGGPGPAE

SEQ ID NO: 7979 - protein, 15 aa, synthetic construct
EDASAFEFASSWSCL

SEQ ID NO: 7980 - protein, 15 aa, synthetic construct
EDAWASARAAAAPGG

SEQ ID NO: 7981 - protein, 15 aa, synthetic construct
EDDAGAPVPRAHPDG

SEQ ID NO: 7982 - protein, 15 aa, synthetic construct
EDDCGFRGVSEGLAP

SEQ ID NO: 7983 - protein, 15 aa, synthetic construct
EDEHPDSTQTPGACG

SEQ ID NO: 7984 - protein, 15 aa, synthetic construct
EDEHPDSTQTPGAGG

SEQ ID NO: 7985 - protein, 15 aa, synthetic construct
EDFVFLSSDQQKYAS

SEQ ID NO: 7986 - protein, 15 aa, synthetic construct
EDGAGAREGYPDGHR

SEQ ID NO: 7987 - protein, 15 aa, synthetic construct
EDIACHAWNWEIILG

SEQ ID NO: 7988 - protein, 15 aa, synthetic construct
EDLHLLSVPCPSYKK

SEQ ID NO: 7989 - protein, 15 aa, synthetic construct
EDLLPFGPGTAGAHA

SEQ ID NO: 7990 - protein, 15 aa, synthetic construct
EDPLSSVCFALPVFG

SEQ ID NO: 7991 - protein, 15 aa, synthetic construct
EEAKHDKCHKRPAHC

SEQ ID NO: 7992 - protein, 15 aa, synthetic construct
EEALQLRETPGPGAP

SEQ ID NO: 7993 - protein, 15 aa, synthetic construct
EEALSCRWQGRAGPG

SEQ ID NO: 7994 - protein, 15 aa, synthetic construct
EEARIRCHQEPSSQQ

SEQ ID NO: 7995 - protein, 15 aa, synthetic construct
EEAVQSHAPAGQPDG

SEQ ID NO: 7996 - protein, 15 aa, synthetic construct
EECPLPAGVLPARHG

SEQ ID NO: 7997 - protein, 15 aa, synthetic construct
EEDARRRLPRAVWRF

SEQ ID NO: 7998 - protein, 15 aa, synthetic construct
EEDEEDVGHAGAGGG

SEQ ID NO: 7999 - protein, 15 aa, synthetic construct
EEDPRRGGCDAADRQ

SEQ ID NO: 8000 - protein, 15 aa, synthetic construct
EEEAPQKADPFSLQA

SEQ ID NO: 8001 - protein, 15 aa, synthetic construct
EEEFGPAAAAVAVVR

SEQ ID NO: 8002 - protein, 15 aa, synthetic construct
EEESWPGGQHEVSGG

SEQ ID NO: 8003 - protein, 15 aa, synthetic construct
EEGACASLPVLRVVP

SEQ ID NO: 8004 - protein, 15 aa, synthetic construct
EEGASRGRALLPPPA

SEQ ID NO: 8005 - protein, 15 aa, synthetic construct
EEGATGARGASGQAL

SEQ ID NO: 8006 - protein, 15 aa, synthetic construct
EEGGVLRGLPQGRVR

SEQ ID NO: 8007 - protein, 15 aa, synthetic construct
EEGQEEKVRGQTPPR

SEQ ID NO: 8008 - protein, 15 aa, synthetic construct
EEGQGLVWQEELRAG

SEQ ID NO: 8009 - protein, 15 aa, synthetic construct
EEGRARRQSHAVPAA

SEQ ID NO: 8010 - protein, 15 aa, synthetic construct
EEIQDVLALLVPGTQ

SEQ ID NO: 8011 - protein, 15 aa, synthetic construct
EEIQHQEGAGRPDRR

SEQ ID NO: 8012 - protein, 15 aa, synthetic construct
EEIWEPGSRGNEQLG

SEQ ID NO: 8013 - protein, 15 aa, synthetic construct
EELRGAYPGCGGCCS

SEQ ID NO: 8014 - protein, 15 aa, synthetic construct
EENGKNLKRCWGVQR

SEQ ID NO: 8015 - protein, 15 aa, synthetic construct
EENSLVYCGDLFSVL

SEQ ID NO: 8016 - protein, 15 aa, synthetic construct
EEPLRFGSVLHLSHC

SEQ ID NO: 8017 - protein, 15 aa, synthetic construct
EEQINGNRVHSPRID

SEQ ID NO: 8018 - protein, 15 aa, synthetic construct
EESYKADRIYSSGTD

SEQ ID NO: 8019 - protein, 15 aa, synthetic construct
EFAKYMEHRKLSLLD

SEQ ID NO: 8020 - protein, 15 aa, synthetic construct
EFCTEWAQKAPQPVH

SEQ ID NO: 8021 - protein, 15 aa, synthetic construct
EFECKKSHSACNNAN

SEQ ID NO: 8022 - protein, 15 aa, synthetic construct
EFFRGADGRVSNYLH

SEQ ID NO: 8023 - protein, 15 aa, synthetic construct
EFGFVGLQTKAAQEA

SEQ ID NO: 8024 - protein, 15 aa, synthetic construct
EFGWGPGTPEDRWEP

SEQ ID NO: 8025 - protein, 15 aa, synthetic construct
EFLFCESHFPREPSQ

SEQ ID NO: 8026 - protein, 15 aa, synthetic construct
EFLISPAFLGSQPEC

SEQ ID NO: 8027 - protein, 15 aa, synthetic construct
EFLQLRAVLLDLLQA

SEQ ID NO: 8028 - protein, 15 aa, synthetic construct
EFPEGRESHRSDGVH

SEQ ID NO: 8029 - protein, 15 aa, synthetic construct
EFPPRGNGGSECRTP

SEQ ID NO: 8030 - protein, 15 aa, synthetic construct
EFPQGGRSEQSVPEG

SEQ ID NO: 8031 - protein, 15 aa, synthetic construct
EFREPDRDQDRAPLS

SEQ ID NO: 8032 - protein, 15 aa, synthetic construct
EFRRANRYVAHHSGG

SEQ ID NO: 8033 - protein, 15 aa, synthetic construct
EFRSCHEIWKRLLGR

SEQ ID NO: 8034 - protein, 15 aa, synthetic construct
EFSGWTREEERLRRR

SEQ ID NO: 8035 - protein, 15 aa, synthetic construct
EFVLREPAVLQVQGG

SEQ ID NO: 8036 - protein, 15 aa, synthetic construct
EFWNLTGLSEGTHLP

SEQ ID NO: 8037 - protein, 15 aa, synthetic construct
EGAAAGLRGAALRPG

SEQ ID NO: 8038 - protein, 15 aa, synthetic construct
EGAALMCRHRASEHG

SEQ ID NO: 8039 - protein, 15 aa, synthetic construct
EGACAAGPWVYAAQR

SEQ ID NO: 8040 - protein, 15 aa, synthetic construct
EGADQVPQQQVRGLH

SEQ ID NO: 8041 - protein, 15 aa, synthetic construct
EGADRELPEPDSGGR

SEQ ID NO: 8042 - protein, 15 aa, synthetic construct
EGAFAPPPRLPPPAA

SEQ ID NO: 8043 - protein, 15 aa, synthetic construct
EGAGCHQAVCGADPE

SEQ ID NO: 8044 - protein, 15 aa, synthetic construct
EGAGPARLPPGLAPV

SEQ ID NO: 8045 - protein, 15 aa, synthetic construct
EGAGRAPAGGHAVRA

SEQ ID NO: 8046 - protein, 15 aa, synthetic construct
EGAPCIWPCCLPHHG

SEQ ID NO: 8047 - protein, 15 aa, synthetic construct
EGAPNLLQPPAAVIA

SEQ ID NO: 8048 - protein, 15 aa, synthetic construct
EGAPSGSGNWGRLYW

SEQ ID NO: 8049 - protein, 15 aa, synthetic construct
EGARGCPACPLAVRA

SEQ ID NO: 8050 - protein, 15 aa, synthetic construct
EGARWPDSGPAPRPG

SEQ ID NO: 8051 - protein, 15 aa, synthetic construct
EGCAGTRGESAQRLR

SEQ ID NO: 8052 - protein, 15 aa, synthetic construct
EGCLHRLSMPHQRPR

SEQ ID NO: 8053 - protein, 15 aa, synthetic construct
EGCRDAEGHWAPAFP

SEQ ID NO: 8054 - protein, 15 aa, synthetic construct
EGDGRRLLRMFGREG

SEQ ID NO: 8055 - protein, 15 aa, synthetic construct
EGDIRHLCSSAGSDL

SEQ ID NO: 8056 - protein, 15 aa, synthetic construct
EGDLLRRHPCSSYLH

SEQ ID NO: 8057 - protein, 15 aa, synthetic construct
EGDLQDLCPRAVWKP

SEQ ID NO: 8058 - protein, 15 aa, synthetic construct
EGDPGLRRGCPLLHP

SEQ ID NO: 8059 - protein, 15 aa, synthetic construct
EGDPQLPGHPDVDLP

SEQ ID NO: 8060 - protein, 15 aa, synthetic construct
EGDRAHADRAVRESD

SEQ ID NO: 8061 - protein, 15 aa, synthetic construct
EGDRAHPGRPVRQPD

SEQ ID NO: 8062 - protein, 15 aa, synthetic construct
EGDRGAGRLLLLRAA

SEQ ID NO: 8063 - protein, 15 aa, synthetic construct
EGECVGAGACARGAG

SEQ ID NO: 8064 - protein, 15 aa, synthetic construct
EGEEGRRWGRDGDGV

SEQ ID NO: 8065 - protein, 15 aa, synthetic construct
EGEGGEGWGRKAGPH

SEQ ID NO: 8066 - protein, 15 aa, synthetic construct
EGEKSQPEIIQQIYH

SEQ ID NO: 8067 - protein, 15 aa, synthetic construct
EGELGGSGEPPVLPA

SEQ ID NO: 8068 - protein, 15 aa, synthetic construct
EGEREGKRPGPRPPP

SEQ ID NO: 8069 - protein, 15 aa, synthetic construct
EGERGGQVPRVHPRG

SEQ ID NO: 8070 - protein, 15 aa, synthetic construct
EGERRSAGAGLAFQP

SEQ ID NO: 8071 - protein, 15 aa, synthetic construct
EGETAIAGGSCFTAS

SEQ ID NO: 8072 - protein, 15 aa, synthetic construct
EGEVQECGQDQEGEG

SEQ ID NO: 8073 - protein, 15 aa, synthetic construct
EGFCSASVPAAHGSH

SEQ ID NO: 8074 - protein, 15 aa, synthetic construct
EGFHSHSLPLDSDFS

SEQ ID NO: 8075 - protein, 15 aa, synthetic construct
EGFRVWGAADRPAPK

SEQ ID NO: 8076 - protein, 15 aa, synthetic construct
EGGAGAADDGGRLRR

SEQ ID NO: 8077 - protein, 15 aa, synthetic construct
EGGARDEPHRAVAIR

SEQ ID NO: 8078 - protein, 15 aa, synthetic construct
EGGDQGPEEGWQEAQ

SEQ ID NO: 8079 - protein, 15 aa, synthetic construct
EGGEERTGAREPAKT

SEQ ID NO: 8080 - protein, 15 aa, synthetic construct
EGGERELQRGERTAE

SEQ ID NO: 8081 - protein, 15 aa, synthetic construct
EGGGGRPLHDQPVGA

SEQ ID NO: 8082 - protein, 15 aa, synthetic construct
EGGIRHALALGPCVA

SEQ ID NO: 8083 - protein, 15 aa, synthetic construct
EGGKTGAAMHPQLPG

SEQ ID NO: 8084 - protein, 15 aa, synthetic construct
EGGPLRAAQRWLAQR

SEQ ID NO: 8085 - protein, 15 aa, synthetic construct
EGGQEKLLHTEAASA

SEQ ID NO: 8086 - protein, 15 aa, synthetic construct
EGGRRSQADSHHHQD

SEQ ID NO: 8087 - protein, 15 aa, synthetic construct
EGGTTRPPPPPPPPP

SEQ ID NO: 8088 - protein, 15 aa, synthetic construct
EGGWPRSHPGDEAAA

SEQ ID NO: 8089 - protein, 15 aa, synthetic construct
EGHLDQASEKSQGRK

SEQ ID NO: 8090 - protein, 15 aa, synthetic construct
EGKPGCRRSSWLEPR

SEQ ID NO: 8091 - protein, 15 aa, synthetic construct
EGLAGAAGPCPGAPG

SEQ ID NO: 8092 - protein, 15 aa, synthetic construct
EGLGEGRSRRDASGT

SEQ ID NO: 8093 - protein, 15 aa, synthetic construct
EGLGHCGSDLGHADG

SEQ ID NO: 8094 - protein, 15 aa, synthetic construct
EGLHFHSVFILCPIC

SEQ ID NO: 8095 - protein, 15 aa, synthetic construct
EGLHLPGIGRAVWPG

SEQ ID NO: 8096 - protein, 15 aa, synthetic construct
EGLLRCHPLHGGNRI

SEQ ID NO: 8097 - protein, 15 aa, synthetic construct
EGLPHTLSLRARRQD

SEQ ID NO: 8098 - protein, 15 aa, synthetic construct
EGLPHWQVQISVTTG

SEQ ID NO: 8099 - protein, 15 aa, synthetic construct
EGLPRAEEPGLRGPL

SEQ ID NO: 8100 - protein, 15 aa, synthetic construct
EGLPSLLHFSKFYVQ

SEQ ID NO: 8101 - protein, 15 aa, synthetic construct
EGLRGCPLLPHACCC

SEQ ID NO: 8102 - protein, 15 aa, synthetic construct
EGLRGCPLLPHACYC

SEQ ID NO: 8103 - protein, 15 aa, synthetic construct
EGLRGSPRCHPHCYC

SEQ ID NO: 8104 - protein, 15 aa, synthetic construct
EGLRSTSVAAAHSSC

SEQ ID NO: 8105 - protein, 15 aa, synthetic construct
EGLRVPADQPRGRPA

SEQ ID NO: 8106 - protein, 15 aa, synthetic construct
EGLVFCLWSPFLDVH

SEQ ID NO: 8107 - protein, 15 aa, synthetic construct
EGLVSPLLVPLHIPD

SEQ ID NO: 8108 - protein, 15 aa, synthetic construct
EGLVSPLLVPLHISD

SEQ ID NO: 8109 - protein, 15 aa, synthetic construct
EGNATLKLRTPLPTP

SEQ ID NO: 8110 - protein, 15 aa, synthetic construct
EGNRAHPGWSVWQPD

SEQ ID NO: 8111 - protein, 15 aa, synthetic construct
EGNRALAGRAVRQPN

SEQ ID NO: 8112 - protein, 15 aa, synthetic construct
EGPAAATPRVLQVRA

SEQ ID NO: 8113 - protein, 15 aa, synthetic construct
EGPAGQAAQAARGSR

SEQ ID NO: 8114 - protein, 15 aa, synthetic construct
EGPCKEEGGQKGWGY

SEQ ID NO: 8115 - protein, 15 aa, synthetic construct
EGPCSCPPCPRLHHG

SEQ ID NO: 8116 - protein, 15 aa, synthetic construct
EGPGASAVPVPAGWP

SEQ ID NO: 8117 - protein, 15 aa, synthetic construct
EGPGRRPGPRLDPRP

SEQ ID NO: 8118 - protein, 15 aa, synthetic construct
EGPGWALRGAAGVSP

SEQ ID NO: 8119 - protein, 15 aa, synthetic construct
EGPHPRLPGGSCSCK

SEQ ID NO: 8120 - protein, 15 aa, synthetic construct
EGPLCVQERQLQRGP

SEQ ID NO: 8121 - protein, 15 aa, synthetic construct
EGPLPGCWPDSCYSG

SEQ ID NO: 8122 - protein, 15 aa, synthetic construct
EGQQLLDRGGVPHRW

SEQ ID NO: 8123 - protein, 15 aa, synthetic construct
EGQRERARRVLPMCA

SEQ ID NO: 8124 - protein, 15 aa, synthetic construct
EGQREVLDAPGRGPQ

SEQ ID NO: 8125 - protein, 15 aa, synthetic construct
EGQRRVLPRLAGRAG

SEQ ID NO: 8126 - protein, 15 aa, synthetic construct
EGQTEEEEGAHVGRG

SEQ ID NO: 8127 - protein, 15 aa, synthetic construct
EGQVDVPGGVVTWFQ

SEQ ID NO: 8128 - protein, 15 aa, synthetic construct
EGRAAAGGLGTPELP

SEQ ID NO: 8129 - protein, 15 aa, synthetic construct
EGRAQERRGGAHHPP

SEQ ID NO: 8130 - protein, 15 aa, synthetic construct
EGREKLQLRRCEHQP

SEQ ID NO: 8131 - protein, 15 aa, synthetic construct
EGREKSAPYPFVTYY

SEQ ID NO: 8132 - protein, 15 aa, synthetic construct
EGRGCGAGERRPSWG

SEQ ID NO: 8133 - protein, 15 aa, synthetic construct
EGRGEGNSCKSGTAL

SEQ ID NO: 8134 - protein, 15 aa, synthetic construct
EGRPHGHRHPVGIRH

SEQ ID NO: 8135 - protein, 15 aa, synthetic construct
EGRRQGLHPRSLFGV

SEQ ID NO: 8136 - protein, 15 aa, synthetic construct
EGRSRGTLRARPAPR

SEQ ID NO: 8137 - protein, 15 aa, synthetic construct
EGRSSVERVWRLPGL

SEQ ID NO: 8138 - protein, 15 aa, synthetic construct
EGRTGLPTAEPELRA

SEQ ID NO: 8139 - protein, 15 aa, synthetic construct
EGRVCTAQHPAGAAA

SEQ ID NO: 8140 - protein, 15 aa, synthetic construct
EGRVVPGQAGRHPGQ

SEQ ID NO: 8141 - protein, 15 aa, synthetic construct
EGSAAPGVPAGELGV

SEQ ID NO: 8142 - protein, 15 aa, synthetic construct
EGSCGDCGGWSGAGH

SEQ ID NO: 8143 - protein, 15 aa, synthetic construct
EGSDKGPEEGRQEAQ

SEQ ID NO: 8144 - protein, 15 aa, synthetic construct
EGSLRAPRPPLRPTP

SEQ ID NO: 8145 - protein, 15 aa, synthetic construct
EGTAGALPSPWLAAL

SEQ ID NO: 8146 - protein, 15 aa, synthetic construct
EGTDLSGGLWDAATA

SEQ ID NO: 8147 - protein, 15 aa, synthetic construct
EGTEGAKPTTPRICP

SEQ ID NO: 8148 - protein, 15 aa, synthetic construct
EGTRLLGHGLRALLL

SEQ ID NO: 8149 - protein, 15 aa, synthetic construct
EGTWPSPSDALKGRQ

SEQ ID NO: 8150 - protein, 15 aa, synthetic construct
EGVGNCSSRQPLGFV

SEQ ID NO: 8151 - protein, 15 aa, synthetic construct
EGVLLFQHQDLPGVR

SEQ ID NO: 8152 - protein, 15 aa, synthetic construct
EGVQQRPSVGLQAPL

SEQ ID NO: 8153 - protein, 15 aa, synthetic construct
EGVRAGSGGRCRPRS

SEQ ID NO: 8154 - protein, 15 aa, synthetic construct
EGWAQPGRGPSTHGR

SEQ ID NO: 8155 - protein, 15 aa, synthetic construct
EGWLCLPVEGGRRVP

SEQ ID NO: 8156 - protein, 15 aa, synthetic construct
EGWWWLCSSPGWTEG

SEQ ID NO: 8157 - protein, 15 aa, synthetic construct
EHAAVLRLLHDRGEQ

SEQ ID NO: 8158 - protein, 15 aa, synthetic construct
EHEAGHCLCSAPAPA

SEQ ID NO: 8159 - protein, 15 aa, synthetic construct
EHFPADWGPVPPGGH

SEQ ID NO: 8160 - protein, 15 aa, synthetic construct
EHGAVAGELTVRLLA

SEQ ID NO: 8161 - protein, 15 aa, synthetic construct
EHGPVQLHLAAPPAA

SEQ ID NO: 8162 - protein, 15 aa, synthetic construct
EHHPRNPSASDHHHL

SEQ ID NO: 8163 - protein, 15 aa, synthetic construct
EHLHPGRDVRGPLRG

SEQ ID NO: 8164 - protein, 15 aa, synthetic construct
EHPAAATALALPLGG

SEQ ID NO: 8165 - protein, 15 aa, synthetic construct
EHPAAQHGGVRHHLG

SEQ ID NO: 8166 - protein, 15 aa, synthetic construct
EHPARLVSHHLRRRV

SEQ ID NO: 8167 - protein, 15 aa, synthetic construct
EHPEPGAQAAALPAL

SEQ ID NO: 8168 - protein, 15 aa, synthetic construct
EHPKGFPHHKRPQRF

SEQ ID NO: 8169 - protein, 15 aa, synthetic construct
EHPQRSARRPDEYAT

SEQ ID NO: 8170 - protein, 15 aa, synthetic construct
EHQPTRGLPMPGSCK

SEQ ID NO: 8171 - protein, 15 aa, synthetic construct
EHQSETDRISIREVQ

SEQ ID NO: 8172 - protein, 15 aa, synthetic construct
EHQVKETVWVFCSRE

SEQ ID NO: 8173 - protein, 15 aa, synthetic construct
EHRDATGGGPLPGMA

SEQ ID NO: 8174 - protein, 15 aa, synthetic construct
EHRGVRCVRHHRPVP

SEQ ID NO: 8175 - protein, 15 aa, synthetic construct
EHRPRPGPCSPDTHA

SEQ ID NO: 8176 - protein, 15 aa, synthetic construct
EHSAFGPAWTLRAQT

SEQ ID NO: 8177 - protein, 15 aa, synthetic construct
EHTGRAPGPAAAPES

SEQ ID NO: 8178 - protein, 15 aa, synthetic construct
EHTQVYPHHNSEIWE

SEQ ID NO: 8179 - protein, 15 aa, synthetic construct
EIAGRGDGFGQVLGP

SEQ ID NO: 8180 - protein, 15 aa, synthetic construct
EICLSEGSVPRASLV

SEQ ID NO: 8181 - protein, 15 aa, synthetic construct
EIDPARAVQRRPGRL

SEQ ID NO: 8182 - protein, 15 aa, synthetic construct
EIGEIPYAGGAGGGP

SEQ ID NO: 8183 - protein, 15 aa, synthetic construct
EIIQPDPLPRLPPRR

SEQ ID NO: 8184 - protein, 15 aa, synthetic construct
EIMEQYNNFRISSPG

SEQ ID NO: 8185 - protein, 15 aa, synthetic construct
EIPGLGAGVRVPVRG

SEQ ID NO: 8186 - protein, 15 aa, synthetic construct
EIQGSEFLESGFCAG

SEQ ID NO: 8187 - protein, 15 aa, synthetic construct
EIQPSALPAASPACA

SEQ ID NO: 8188 - protein, 15 aa, synthetic construct
EIQSWQHGEDCHLSD

SEQ ID NO: 8189 - protein, 15 aa, synthetic construct
EISSGHPPASPVTDR

SEQ ID NO: 8190 - protein, 15 aa, synthetic construct
EIWCRDSDRGTSLGR

SEQ ID NO: 8191 - protein, 15 aa, synthetic construct
EIWHGVCPGMSMPGA

SEQ ID NO: 8192 - protein, 15 aa, synthetic construct
EKAVGVCHEGGRAGG

SEQ ID NO: 8193 - protein, 15 aa, synthetic construct
EKCRRQRQEPPPFPS

SEQ ID NO: 8194 - protein, 15 aa, synthetic construct
EKFEWRPCRGVCLGG

SEQ ID NO: 8195 - protein, 15 aa, synthetic construct
EKFHSSNRLYSSWID

SEQ ID NO: 8196 - protein, 15 aa, synthetic construct
EKHRLQTPWNLGRRP

SEQ ID NO: 8197 - protein, 15 aa, synthetic construct
EKNCLFPMSLICAFA

SEQ ID NO: 8198 - protein, 15 aa, synthetic construct
EKPAPRPPSAGAHVD

SEQ ID NO: 8199 - protein, 15 aa, synthetic construct
EKPCFATPQHGRPAA

SEQ ID NO: 8200 - protein, 15 aa, synthetic construct
EKPHSNKNFYPAGTD

SEQ ID NO: 8201 - protein, 15 aa, synthetic construct
EKTHSNNNIHPSGTD

SEQ ID NO: 8202 - protein, 15 aa, synthetic construct
EKWHSNHRIHPARLS

SEQ ID NO: 8203 - protein, 15 aa, synthetic construct
ELALQFPGSGTNSLP

SEQ ID NO: 8204 - protein, 15 aa, synthetic construct
ELDCACCAGQPESEL

SEQ ID NO: 8205 - protein, 15 aa, synthetic construct
ELDPEGALEPAEHHI

SEQ ID NO: 8206 - protein, 15 aa, synthetic construct
ELEAAAAACRLRFPA

SEQ ID NO: 8207 - protein, 15 aa, synthetic construct
ELFCNHLPQRWYQPR

SEQ ID NO: 8208 - protein, 15 aa, synthetic construct
ELGAPGLRLLQLGHR

SEQ ID NO: 8209 - protein, 15 aa, synthetic construct
ELGGAGGPGRPLSEL

SEQ ID NO: 8210 - protein, 15 aa, synthetic construct
ELGLGHRFREGASLD

SEQ ID NO: 8211 - protein, 15 aa, synthetic construct
ELGLGSRPLRSPPWP

SEQ ID NO: 8212 - protein, 15 aa, synthetic construct
ELHGPRVCGSGLRHS

SEQ ID NO: 8213 - protein, 15 aa, synthetic construct
ELHGPRVCGSGVPHS

SEQ ID NO: 8214 - protein, 15 aa, synthetic construct
ELHHSLHLLHQLPVP

SEQ ID NO: 8215 - protein, 15 aa, synthetic construct
ELHRATESHRCLRIP

SEQ ID NO: 8216 - protein, 15 aa, synthetic construct
ELLEVLLFCFHSAQR

SEQ ID NO: 8217 - protein, 15 aa, synthetic construct
ELLLHHHRELPPFTG

SEQ ID NO: 8218 - protein, 15 aa, synthetic construct
ELLPGVRVMQQQRRG

SEQ ID NO: 8219 - protein, 15 aa, synthetic construct
ELLPLPQCRRHLHPG

SEQ ID NO: 8220 - protein, 15 aa, synthetic construct
ELLPRSPKPSGLQRL

SEQ ID NO: 8221 - protein, 15 aa, synthetic construct
ELLQPRLGKGGGTRR

SEQ ID NO: 8222 - protein, 15 aa, synthetic construct
ELPAAVAGLPTPHDS

SEQ ID NO: 8223 - protein, 15 aa, synthetic construct
ELPERQRGSFQTSEA

SEQ ID NO: 8224 - protein, 15 aa, synthetic construct
ELPGPTQTPGAGRAE

SEQ ID NO: 8225 - protein, 15 aa, synthetic construct
ELPHQQEPLACRLPA

SEQ ID NO: 8226 - protein, 15 aa, synthetic construct
ELPHRQGARLSRHPS

SEQ ID NO: 8227 - protein, 15 aa, synthetic construct
ELPMSEFGKQICLFK

SEQ ID NO: 8228 - protein, 15 aa, synthetic construct
ELPPACLGLFQRREL

SEQ ID NO: 8229 - protein, 15 aa, synthetic construct
ELPQSCGAAGQSSTC

SEQ ID NO: 8230 - protein, 15 aa, synthetic construct
ELQQGLRGAVRRLGA

SEQ ID NO: 8231 - protein, 15 aa, synthetic construct
ELRPSRQPETQASVA

SEQ ID NO: 8232 - protein, 15 aa, synthetic construct
ELSAARPQWLLPPGG

SEQ ID NO: 8233 - protein, 15 aa, synthetic construct
ELSDLLQISRKRRRW

SEQ ID NO: 8234 - protein, 15 aa, synthetic construct
ELSRWAQLPVRAALR

SEQ ID NO: 8235 - protein, 15 aa, synthetic construct
ELWEDSVPPAYPQAH

SEQ ID NO: 8236 - protein, 15 aa, synthetic construct
EMLGEQAYSEGNTGY

SEQ ID NO: 8237 - protein, 15 aa, synthetic construct
ENRHVWQAARAGAGD

SEQ ID NO: 8238 - protein, 15 aa, synthetic construct
EPPVASAGAAAASRG

SEQ ID NO: 8239 - protein, 15 aa, synthetic construct
EQAAALDLCPHQPPG

SEQ ID NO: 8240 - protein, 15 aa, synthetic construct
EQAAGKSPMPTARMA

SEQ ID NO: 8241 - protein, 15 aa, synthetic construct
EQALHRQPQRERDPR

SEQ ID NO: 8242 - protein, 15 aa, synthetic construct
EQCNRIHPAGPHSQS

SEQ ID NO: 8243 - protein, 15 aa, synthetic construct
EQERPGTTAASVLRR

SEQ ID NO: 8244 - protein, 15 aa, synthetic construct
EQLYPPGRTAHQEIP

SEQ ID NO: 8245 - protein, 15 aa, synthetic construct
EQPASTPSAAAVLAA

SEQ ID NO: 8246 - protein, 15 aa, synthetic construct
EQPVWADRVRGGAAA

SEQ ID NO: 8247 - protein, 15 aa, synthetic construct
EQPWERHPLGEWHLL

SEQ ID NO: 8248 - protein, 15 aa, synthetic construct
EQQFIPAGGCAAVLR

SEQ ID NO: 8249 - protein, 15 aa, synthetic construct
EQSVPGGGLLREARV

SEQ ID NO: 8250 - protein, 15 aa, synthetic construct
EQTCGSAKQVPPCVW

SEQ ID NO: 8251 - protein, 15 aa, synthetic construct
ERAALGRGAGRGGLR

SEQ ID NO: 8252 - protein, 15 aa, synthetic construct
ERAVGWAVAAGTRAG

SEQ ID NO: 8253 - protein, 15 aa, synthetic construct
ERCGGGGWDAAPQLA

SEQ ID NO: 8254 - protein, 15 aa, synthetic construct
ERCSDGRGSPDALRR

SEQ ID NO: 8255 - protein, 15 aa, synthetic construct
ERDAELVYPGGRAPR

SEQ ID NO: 8256 - protein, 15 aa, synthetic construct
EREAAGVVSTSVAAA

SEQ ID NO: 8257 - protein, 15 aa, synthetic construct
EREHGQGPLQRAEMG

SEQ ID NO: 8258 - protein, 15 aa, synthetic construct
ERELQHGTETGRKKQ

SEQ ID NO: 8259 - protein, 15 aa, synthetic construct
ERELRGARPGLGLLP

SEQ ID NO: 8260 - protein, 15 aa, synthetic construct
EREPARRTTCTWLCS

SEQ ID NO: 8261 - protein, 15 aa, synthetic construct
EREPASGRPGAKALH

SEQ ID NO: 8262 - protein, 15 aa, synthetic construct
EREWVLCENPLLAGI

SEQ ID NO: 8263 - protein, 15 aa, synthetic construct
ERGAAAGAGGEGGVG

SEQ ID NO: 8264 - protein, 15 aa, synthetic construct
ERGGVRAQLADSHFP

SEQ ID NO: 8265 - protein, 15 aa, synthetic construct
ERGLARKARAGRPGL

SEQ ID NO: 8266 - protein, 15 aa, synthetic construct
ERGLGARGGGNPRGF

SEQ ID NO: 8267 - protein, 15 aa, synthetic construct
ERGQPRRQPRRERQG

SEQ ID NO: 8268 - protein, 15 aa, synthetic construct
ERHVLPGLFPGHYPA

SEQ ID NO: 8269 - protein, 15 aa, synthetic construct
ERLGLPRGREREPGG

SEQ ID NO: 8270 - protein, 15 aa, synthetic construct
ERLQHGGGQPRRAPR

SEQ ID NO: 8271 - protein, 15 aa, synthetic construct
ERLRVGRGPRPPATP

SEQ ID NO: 8272 - protein, 15 aa, synthetic construct
ERLSKLGTGTRWGTT

SEQ ID NO: 8273 - protein, 15 aa, synthetic construct
ERMGPVAAARAGLDA

SEQ ID NO: 8274 - protein, 15 aa, synthetic construct
ERPAARGLGPRRPPG

SEQ ID NO: 8275 - protein, 15 aa, synthetic construct
ERPARLQHVGHRLPR

SEQ ID NO: 8276 - protein, 15 aa, synthetic construct
ERPDRPQAAGAPAAA

SEQ ID NO: 8277 - protein, 15 aa, synthetic construct
ERPGQPGPGLRLSAQ

SEQ ID NO: 8278 - protein, 15 aa, synthetic construct
ERPGQPRPGLRLPAQ

SEQ ID NO: 8279 - protein, 15 aa, synthetic construct
ERPGRPPHCGSGHAP

SEQ ID NO: 8280 - protein, 15 aa, synthetic construct
ERPGRSESQPRHHQQ

SEQ ID NO: 8281 - protein, 15 aa, synthetic construct
ERPGRTGSVGQGLGR

SEQ ID NO: 8282 - protein, 15 aa, synthetic construct
ERPGWGQEDHSPPNP

SEQ ID NO: 8283 - protein, 15 aa, synthetic construct
ERPKSGSKVLPRQKP

SEQ ID NO: 8284 - protein, 15 aa, synthetic construct
ERPLDAAPRGRGRAG

SEQ ID NO: 8285 - protein, 15 aa, synthetic construct
ERPPCAHPGCPHLLG

SEQ ID NO: 8286 - protein, 15 aa, synthetic construct
ERPPRAEGAAGEAAG

SEQ ID NO: 8287 - protein, 15 aa, synthetic construct
ERPPVASQPASCQVD

SEQ ID NO: 8288 - protein, 15 aa, synthetic construct
ERPQPPPEPGRRGRG

SEQ ID NO: 8289 - protein, 15 aa, synthetic construct
ERPQRDPHLRARREL

SEQ ID NO: 8290 - protein, 15 aa, synthetic construct
ERPRGAAAWRTQEGP

SEQ ID NO: 8291 - protein, 15 aa, synthetic construct
ERPSWRPEPQTGRDP

SEQ ID NO: 8292 - protein, 15 aa, synthetic construct
ERPVPPGSPGWLPGA

SEQ ID NO: 8293 - protein, 15 aa, synthetic construct
ERQVQNHRDYWSSFL

SEQ ID NO: 8294 - protein, 15 aa, synthetic construct
ERRAGTGAAGRRGHA

SEQ ID NO: 8295 - protein, 15 aa, synthetic construct
ERRGYLSLPEGRGGP

SEQ ID NO: 8296 - protein, 15 aa, synthetic construct
ERRLHELRERRAGGG

SEQ ID NO: 8297 - protein, 15 aa, synthetic construct
ERRPAPAGPQTSPGA

SEQ ID NO: 8298 - protein, 15 aa, synthetic construct
ERSLSTDSKCLPHPG

SEQ ID NO: 8299 - protein, 15 aa, synthetic construct
ERWSFPSATAGSGTH

SEQ ID NO: 8300 - protein, 15 aa, synthetic construct
ESAAACCLRDTRPLG

SEQ ID NO: 8301 - protein, 15 aa, synthetic construct
ESAAAGEEVTQSPPG

SEQ ID NO: 8302 - protein, 15 aa, synthetic construct
ESAGGWPQRFYESGA

SEQ ID NO: 8303 - protein, 15 aa, synthetic construct
ESAGVPRGPGPERGR

SEQ ID NO: 8304 - protein, 15 aa, synthetic construct
ESAPDATQAFSALPR

SEQ ID NO: 8305 - protein, 15 aa, synthetic construct
ESAPSAGSLSGNRQE

SEQ ID NO: 8306 - protein, 15 aa, synthetic construct
ESAQWGQGSWNEDLQ

SEQ ID NO: 8307 - protein, 15 aa, synthetic construct
ESAYAPETAGSQDGH

SEQ ID NO: 8308 - protein, 15 aa, synthetic construct
ESCEALGQPLPFPLA

SEQ ID NO: 8309 - protein, 15 aa, synthetic construct
ESCGKTQSHGSDQGD

SEQ ID NO: 8310 - protein, 15 aa, synthetic construct
ESCGRSRVQHPPGHR

SEQ ID NO: 8311 - protein, 15 aa, synthetic construct
ESDRVLRQDGHRGAL

SEQ ID NO: 8312 - protein, 15 aa, synthetic construct
ESEAIPGQRADPQRP

SEQ ID NO: 8313 - protein, 15 aa, synthetic construct
ESELREVRAGAVAAG

SEQ ID NO: 8314 - protein, 15 aa, synthetic construct
ESEPGGDPGRGVDPE

SEQ ID NO: 8315 - protein, 15 aa, synthetic construct
ESGAKSSQGSAGLGL

SEQ ID NO: 8316 - protein, 15 aa, synthetic construct
ESGDLDLPARPSWAL

SEQ ID NO: 8317 - protein, 15 aa, synthetic construct
ESGDYAPARSVARRE

SEQ ID NO: 8318 - protein, 15 aa, synthetic construct
ESGHHGRGRPGRVLP

SEQ ID NO: 8319 - protein, 15 aa, synthetic construct
ESGPRQPDGRGGPVP

SEQ ID NO: 8320 - protein, 15 aa, synthetic construct
ESGRWAGLEPRRRAT

SEQ ID NO: 8321 - protein, 15 aa, synthetic construct
ESHHSSYSSCSPFCK

SEQ ID NO: 8322 - protein, 15 aa, synthetic construct
ESHQCYHLPSCSFCP

SEQ ID NO: 8323 - protein, 15 aa, synthetic construct
ESHSADSSTTWHRAG

SEQ ID NO: 8324 - protein, 15 aa, synthetic construct
ESISKEEAQEQQGFQ

SEQ ID NO: 8325 - protein, 15 aa, synthetic construct
ESKTSEPPSQEPCPS

SEQ ID NO: 8326 - protein, 15 aa, synthetic construct
ESLCLILSDHLPWNQ

SEQ ID NO: 8327 - protein, 15 aa, synthetic construct
ESLCRPSVPAAHSSH

SEQ ID NO: 8328 - protein, 15 aa, synthetic construct
ESLCSASVPAAHDSS

SEQ ID NO: 8329 - protein, 15 aa, synthetic construct
ESLELVPAADPLPPA

SEQ ID NO: 8330 - protein, 15 aa, synthetic construct
ESLHAFCSMETYSGT

SEQ ID NO: 8331 - protein, 15 aa, synthetic construct
ESLHLGPHSAQPHAP

SEQ ID NO: 8332 - protein, 15 aa, synthetic construct
ESLPCRSCADTGAAV

SEQ ID NO: 8333 - protein, 15 aa, synthetic construct
ESLQQPRPDPAEQRV

SEQ ID NO: 8334 - protein, 15 aa, synthetic construct
ESNCHSDLLPYLSDS

SEQ ID NO: 8335 - protein, 15 aa, synthetic construct
ESPAATAGAGGAVAL

SEQ ID NO: 8336 - protein, 15 aa, synthetic construct
ESPGPLHEDDRRAGE

SEQ ID NO: 8337 - protein, 15 aa, synthetic construct
ESPHTPRPIGPGRTL

SEQ ID NO: 8338 - protein, 15 aa, synthetic construct
ESPLRSPAACPGRLA

SEQ ID NO: 8339 - protein, 15 aa, synthetic construct
ESPLVPAFAAPPRLR

SEQ ID NO: 8340 - protein, 15 aa, synthetic construct
ESPPRPGVEEGSAAS

SEQ ID NO: 8341 - protein, 15 aa, synthetic construct
ESPSQATQQTGGQAG

SEQ ID NO: 8342 - protein, 15 aa, synthetic construct
ESPWRRQGPGPGAGS

SEQ ID NO: 8343 - protein, 15 aa, synthetic construct
ESPYAAHPVCSALLG

SEQ ID NO: 8344 - protein, 15 aa, synthetic construct
ESQKPLRTRGQLPRR

SEQ ID NO: 8345 - protein, 15 aa, synthetic construct
ESQLFQQLSLPCQQF

SEQ ID NO: 8346 - protein, 15 aa, synthetic construct
ESQLHLSSTPGVFSE

SEQ ID NO: 8347 - protein, 15 aa, synthetic construct
ESRKLLRHSRILSLG

SEQ ID NO: 8348 - protein, 15 aa, synthetic construct
ESRPGHRPQHISTCP

SEQ ID NO: 8349 - protein, 15 aa, synthetic construct
ESSARSHTLAASACL

SEQ ID NO: 8350 - protein, 15 aa, synthetic construct
ESSASEWETAAFRIR

SEQ ID NO: 8351 - protein, 15 aa, synthetic construct
ESSIIAPPTPSSSFW

SEQ ID NO: 8352 - protein, 15 aa, synthetic construct
ESSITAHHTRSSSFW

SEQ ID NO: 8353 - protein, 15 aa, synthetic construct
ESSITAPPTPSSSFW

SEQ ID NO: 8354 - protein, 15 aa, synthetic construct
ESSITVPPTPSFFLW

SEQ ID NO: 8355 - protein, 15 aa, synthetic construct
ESSKSFPGGRICSTG

SEQ ID NO: 8356 - protein, 15 aa, synthetic construct
ESVIRPQPLPPAAGA

SEQ ID NO: 8357 - protein, 15 aa, synthetic construct
ESWAVAMAVAVVMAM

SEQ ID NO: 8358 - protein, 15 aa, synthetic construct
ESWGTGVAPDLRGLL

SEQ ID NO: 8359 - protein, 15 aa, synthetic construct
ESWRSIPPSTRVPEP

SEQ ID NO: 8360 - protein, 15 aa, synthetic construct
ESWSLRGLNCLDFIN

SEQ ID NO: 8361 - protein, 15 aa, synthetic construct
ETAGGLAVPEPGVRV

SEQ ID NO: 8362 - protein, 15 aa, synthetic construct
ETAHRVGEAAVHRRG

SEQ ID NO: 8363 - protein, 15 aa, synthetic construct
ETAYPQSAELACAGG

SEQ ID NO: 8364 - protein, 15 aa, synthetic construct
ETCGPAPAPHGRIPG

SEQ ID NO: 8365 - protein, 15 aa, synthetic construct
ETDPLAAERQWDLGA

SEQ ID NO: 8366 - protein, 15 aa, synthetic construct
ETEARIVSVVPLSGQ

SEQ ID NO: 8367 - protein, 15 aa, synthetic construct
ETENDGKTAKNILCF

SEQ ID NO: 8368 - protein, 15 aa, synthetic construct
ETERRLPAPADQHVP

SEQ ID NO: 8369 - protein, 15 aa, synthetic construct
ETGRDDQEDVPERLG

SEQ ID NO: 8370 - protein, 15 aa, synthetic construct
ETKQQCYRICPPGPH

SEQ ID NO: 8371 - protein, 15 aa, synthetic construct
ETKWGPVVPWGPGDE

SEQ ID NO: 8372 - protein, 15 aa, synthetic construct
ETPFPYFCSPPLCDF

SEQ ID NO: 8373 - protein, 15 aa, synthetic construct
ETQPCMCRRAPWPAT

SEQ ID NO: 8374 - protein, 15 aa, synthetic construct
ETSSSPVPSHLGHLL

SEQ ID NO: 8375 - protein, 15 aa, synthetic construct
ETYERGSRQKSNRSN

SEQ ID NO: 8376 - protein, 15 aa, synthetic construct
EVAAEPAEHGALPPG

SEQ ID NO: 8377 - protein, 15 aa, synthetic construct
EVADGPHAGGPLPAL

SEQ ID NO: 8378 - protein, 15 aa, synthetic construct
EVAGLEGEAAAAAGP

SEQ ID NO: 8379 - protein, 15 aa, synthetic construct
EVAVLPLPEHHLCGK

SEQ ID NO: 8380 - protein, 15 aa, synthetic construct
EVCGLWRRRRRGRRR

SEQ ID NO: 8381 - protein, 15 aa, synthetic construct
EVCQAGISSKILHLL

SEQ ID NO: 8382 - protein, 15 aa, synthetic construct
EVDATLLHLEGRTYG

SEQ ID NO: 8383 - protein, 15 aa, synthetic construct
EVDGGGLGLPPALGG

SEQ ID NO: 8384 - protein, 15 aa, synthetic construct
EVDSVLEPHPLPDGA

SEQ ID NO: 8385 - protein, 15 aa, synthetic construct
EVDTVHWGPYWVQHL

SEQ ID NO: 8386 - protein, 15 aa, synthetic construct
EVGGINFFNFPTKFY

SEQ ID NO: 8387 - protein, 15 aa, synthetic construct
EVGGVRPSRGPRGQA

SEQ ID NO: 8388 - protein, 15 aa, synthetic construct
EVGPARHRVRLRALR

SEQ ID NO: 8389 - protein, 15 aa, synthetic construct
EVGRCPDSWREGGVR

SEQ ID NO: 8390 - protein, 15 aa, synthetic construct
EVGSSGRMRTASGRP

SEQ ID NO: 8391 - protein, 15 aa, synthetic construct
EVHDSPLPDSSGRSP

SEQ ID NO: 8392 - protein, 15 aa, synthetic construct
EVHHPLCPFPAPYLG

SEQ ID NO: 8393 - protein, 15 aa, synthetic construct
EVHIPSHGYSPGNCH

SEQ ID NO: 8394 - protein, 15 aa, synthetic construct
EVHPGPGVAGVESVL

SEQ ID NO: 8395 - protein, 15 aa, synthetic construct
EVIRLREPQGPDGPG

SEQ ID NO: 8396 - protein, 15 aa, synthetic construct
EVKPPVHRVRQCDLL

SEQ ID NO: 8397 - protein, 15 aa, synthetic construct
EVLCPSVPGGHPVPC

SEQ ID NO: 8398 - protein, 15 aa, synthetic construct
EVLQAQRPAGGSARC

SEQ ID NO: 8399 - protein, 15 aa, synthetic construct
EVLRAQTGTQPPEAL

SEQ ID NO: 8400 - protein, 15 aa, synthetic construct
EVLRLSANILHKRGL

SEQ ID NO: 8401 - protein, 15 aa, synthetic construct
EVLSSPGTLGSFHLS

SEQ ID NO: 8402 - protein, 15 aa, synthetic construct
EVNLFRMGQLFTSKS

SEQ ID NO: 8403 - protein, 15 aa, synthetic construct
EVPGRAAGRGHAGVP

SEQ ID NO: 8404 - protein, 15 aa, synthetic construct
EVPHLQTEGANPDAR

SEQ ID NO: 8405 - protein, 15 aa, synthetic construct
EVPRLAEQHPPQPLS

SEQ ID NO: 8406 - protein, 15 aa, synthetic construct
EVPRPAPLSCSALGL

SEQ ID NO: 8407 - protein, 15 aa, synthetic construct
EVPTVHPCSFYAPGP

SEQ ID NO: 8408 - protein, 15 aa, synthetic construct
EVQCPARGEAAGGAA

SEQ ID NO: 8409 - protein, 15 aa, synthetic construct
EVQKEAPSISVLLQD

SEQ ID NO: 8410 - protein, 15 aa, synthetic construct
EVQRPCGEAAQSPGE

SEQ ID NO: 8411 - protein, 15 aa, synthetic construct
EVQTQPDADLRPRGV

SEQ ID NO: 8412 - protein, 15 aa, synthetic construct
EVRAFHPLLYPPALD

SEQ ID NO: 8413 - protein, 15 aa, synthetic construct
EVRAPHGVVLPLCPF

SEQ ID NO: 8414 - protein, 15 aa, synthetic construct
EVRAVAAPRGHLRGA

SEQ ID NO: 8415 - protein, 15 aa, synthetic construct
EVRAVPQGPGGPADH

SEQ ID NO: 8416 - protein, 15 aa, synthetic construct
EVRGLGPGPGSPPAQ

SEQ ID NO: 8417 - protein, 15 aa, synthetic construct
EVRPLPPAGDLVLPG

SEQ ID NO: 8418 - protein, 15 aa, synthetic construct
EVRVQRRASVREAPL

SEQ ID NO: 8419 - protein, 15 aa, synthetic construct
EVSADLPLPMPFAPS

SEQ ID NO: 8420 - protein, 15 aa, synthetic construct
EVSAERKEEGQRKGA

SEQ ID NO: 8421 - protein, 15 aa, synthetic construct
EVSGQDRGRGLSEPL

SEQ ID NO: 8422 - protein, 15 aa, synthetic construct
EVSGSRPGPERWRGE

SEQ ID NO: 8423 - protein, 15 aa, synthetic construct
EVSREAQGPGSCFPA

SEQ ID NO: 8424 - protein, 15 aa, synthetic construct
EVSRQDHRQRLSRAV

SEQ ID NO: 8425 - protein, 15 aa, synthetic construct
EVSRRPDPRKGPAWC

SEQ ID NO: 8426 - protein, 15 aa, synthetic construct
EVSSNTAPAGHCFWS

SEQ ID NO: 8427 - protein, 15 aa, synthetic construct
EVTRTGDLRGARSGC

SEQ ID NO: 8428 - protein, 15 aa, synthetic construct
EWDRKPAAGPRGTLP

SEQ ID NO: 8429 - protein, 15 aa, synthetic construct
EWEAASGARPSPGGK

SEQ ID NO: 8430 - protein, 15 aa, synthetic construct
EWELGAPRPDPNLGY

SEQ ID NO: 8431 - protein, 15 aa, synthetic construct
EWGECHQGQHLHPGG

SEQ ID NO: 8432 - protein, 15 aa, synthetic construct
EWGECHQGRHLHPGG

SEQ ID NO: 8433 - protein, 15 aa, synthetic construct
EWGPDPPYAHRSGLL

SEQ ID NO: 8434 - protein, 15 aa, synthetic construct
EWGPNGRKARGPRST

SEQ ID NO: 8435 - protein, 15 aa, synthetic construct
EWGVLGWIPRSLGLR

SEQ ID NO: 8436 - protein, 15 aa, synthetic construct
EWIGAGRGGSSVCSG

SEQ ID NO: 8437 - protein, 15 aa, synthetic construct
EWKSPSEGQRHRPQP

SEQ ID NO: 8438 - protein, 15 aa, synthetic construct
EWLCILASKKPIYPP

SEQ ID NO: 8439 - protein, 15 aa, synthetic construct
EWNESLCGIRICIHG

SEQ ID NO: 8440 - protein, 15 aa, synthetic construct
EWPGPEQARWPEPCG

SEQ ID NO: 8441 - protein, 15 aa, synthetic construct
EWQWQRGWWGRWRRP

SEQ ID NO: 8442 - protein, 15 aa, synthetic construct
EWRLGQSLGPCGRRP

SEQ ID NO: 8443 - protein, 15 aa, synthetic construct
EWRSWAGSHTHLDLP

SEQ ID NO: 8444 - protein, 15 aa, synthetic construct
EWSRLLPGRDPAPPG

SEQ ID NO: 8445 - protein, 15 aa, synthetic construct
EWTPHPVCAVCHRGL

SEQ ID NO: 8446 - protein, 15 aa, synthetic construct
EYHGLQREEAGGRRR

SEQ ID NO: 8447 - protein, 15 aa, synthetic construct
EYPDADLHYLWVANS

SEQ ID NO: 8448 - protein, 15 aa, synthetic construct
EYVSVLSDHHQRGDA

SEQ ID NO: 8449 - protein, 15 aa, synthetic construct
EYYDVAHGAKDPVGP

SEQ ID NO: 8450 - protein, 15 aa, synthetic construct
GAAACSPSVAWMLWT

SEQ ID NO: 8451 - protein, 15 aa, synthetic construct
GAAAGAAGGARLRDG

SEQ ID NO: 8452 - protein, 15 aa, synthetic construct
GAAAHDPGVGRAGFL

SEQ ID NO: 8453 - protein, 15 aa, synthetic construct
GAAALPGAGNHPARE

SEQ ID NO: 8454 - protein, 15 aa, synthetic construct
GAAAPAAAAATAAAA

SEQ ID NO: 8455 - protein, 15 aa, synthetic construct
GAAAPGEPLVPVRHH

SEQ ID NO: 8456 - protein, 15 aa, synthetic construct
GAAAPGVQRLLPRQP

SEQ ID NO: 8457 - protein, 15 aa, synthetic construct
GAAAPLPHGGDAAVH

SEQ ID NO: 8458 - protein, 15 aa, synthetic construct
GAAAPPRSRRRRAPG

SEQ ID NO: 8459 - protein, 15 aa, synthetic construct
GAAARPRPHPGAATG

SEQ ID NO: 8460 - protein, 15 aa, synthetic construct
GAAATEDRGAGVTAP

SEQ ID NO: 8461 - protein, 15 aa, synthetic construct
GAAERTGAADGEEFL

SEQ ID NO: 8462 - protein, 15 aa, synthetic construct
GAAGARGRPQGAAIA

SEQ ID NO: 8463 - protein, 15 aa, synthetic construct
GAAGARHGAQPRPQP

SEQ ID NO: 8464 - protein, 15 aa, synthetic construct
GAAGARRGGHEPSHP

SEQ ID NO: 8465 - protein, 15 aa, synthetic construct
GAAGGAAGGCRGWSS

SEQ ID NO: 8466 - protein, 15 aa, synthetic construct
GAAGGCGLAGDRAGA

SEQ ID NO: 8467 - protein, 15 aa, synthetic construct
GAAGGEGAQRRPVPA

SEQ ID NO: 8468 - protein, 15 aa, synthetic construct
GAAGGELGSGEQPAP

SEQ ID NO: 8469 - protein, 15 aa, synthetic construct
GAAGGHSHGGGGLLA

SEQ ID NO: 8470 - protein, 15 aa, synthetic construct
GAAGGPRVRVPHAPA

SEQ ID NO: 8471 - protein, 15 aa, synthetic construct
GAAGGREGAKERRVA

SEQ ID NO: 8472 - protein, 15 aa, synthetic construct
GAAGGRLRGAVPLLL

SEQ ID NO: 8473 - protein, 15 aa, synthetic construct
GAAGHEPRLRAPYPT

SEQ ID NO: 8474 - protein, 15 aa, synthetic construct
GAAGPALGRLGEPHL

SEQ ID NO: 8475 - protein, 15 aa, synthetic construct
GAAGPGGGLCPRGAS

SEQ ID NO: 8476 - protein, 15 aa, synthetic construct
GAAGPGLGGNGRLRV

SEQ ID NO: 8477 - protein, 15 aa, synthetic construct
GAAGPGRARGPAPLA

SEQ ID NO: 8478 - protein, 15 aa, synthetic construct
GAAGPLRGSVRHRRP

SEQ ID NO: 8479 - protein, 15 aa, synthetic construct
GAAGRDRAGGRRGAL

SEQ ID NO: 8480 - protein, 15 aa, synthetic construct
GAAHGGGRRAQPDRA

SEQ ID NO: 8481 - protein, 15 aa, synthetic construct
GAAHPRTPGAGAERR

SEQ ID NO: 8482 - protein, 15 aa, synthetic construct
GAAKAEPERAGNRTR

SEQ ID NO: 8483 - protein, 15 aa, synthetic construct
GAAKPGERGSKGALA

SEQ ID NO: 8484 - protein, 15 aa, synthetic construct
GAALAPGARAGAAAL

SEQ ID NO: 8485 - protein, 15 aa, synthetic construct
GAALGAEPGRTGAQL

SEQ ID NO: 8486 - protein, 15 aa, synthetic construct
GAALGGWEHGRGARA

SEQ ID NO: 8487 - protein, 15 aa, synthetic construct
GAALGHRVCRPHLQR

SEQ ID NO: 8488 - protein, 15 aa, synthetic construct
GAALHSRAPGRQRQR

SEQ ID NO: 8489 - protein, 15 aa, synthetic construct
GAALQPWPSSSPGRV

SEQ ID NO: 8490 - protein, 15 aa, synthetic construct
GAALRQPRPARPARG

SEQ ID NO: 8491 - protein, 15 aa, synthetic construct
GAAPAAPGRAGPGWR

SEQ ID NO: 8492 - protein, 15 aa, synthetic construct
GAAPADTQFHGDLPV

SEQ ID NO: 8493 - protein, 15 aa, synthetic construct
GAAPARAVAEEALGA

SEQ ID NO: 8494 - protein, 15 aa, synthetic construct
GAAPEWRQILPRCPR

SEQ ID NO: 8495 - protein, 15 aa, synthetic construct
GAAPGAAAGRGRALG

SEQ ID NO: 8496 - protein, 15 aa, synthetic construct
GAAPGPQALPAGEAV

SEQ ID NO: 8497 - protein, 15 aa, synthetic construct
GAAPGRPAAAAAAAA

SEQ ID NO: 8498 - protein, 15 aa, synthetic construct
GAAPRAAGGAGWREL

SEQ ID NO: 8499 - protein, 15 aa, synthetic construct
GAAPRAVVAAALAAA

SEQ ID NO: 8500 - protein, 15 aa, synthetic construct
GAAPRHRLLRAPPPR

SEQ ID NO: 8501 - protein, 15 aa, synthetic construct
GAAPSPAPGAEARGD

SEQ ID NO: 8502 - protein, 15 aa, synthetic construct
GAAQAPRVPLCSGGL

SEQ ID NO: 8503 - protein, 15 aa, synthetic construct
GAAQPAGARDHGGGE

SEQ ID NO: 8504 - protein, 15 aa, synthetic construct
GAAQQNRGVRVLSER

SEQ ID NO: 8505 - protein, 15 aa, synthetic construct
GAARAHSFRAGPARH

SEQ ID NO: 8506 - protein, 15 aa, synthetic construct
GAARARRGPVLAAAA

SEQ ID NO: 8507 - protein, 15 aa, synthetic construct
GAARATVESVGRAAG

SEQ ID NO: 8508 - protein, 15 aa, synthetic construct
GAARDAFLALGGRGG

SEQ ID NO: 8509 - protein, 15 aa, synthetic construct
GAARDWTPGLPLHTF

SEQ ID NO: 8510 - protein, 15 aa, synthetic construct
GAARGLLFLGRLELY

SEQ ID NO: 8511 - protein, 15 aa, synthetic construct
GAARGLLRAGGVRAA

SEQ ID NO: 8512 - protein, 15 aa, synthetic construct
GAARLAAGRGPTAGV

SEQ ID NO: 8513 - protein, 15 aa, synthetic construct
GAARLPMAVGDAAAG

SEQ ID NO: 8514 - protein, 15 aa, synthetic construct
GAARPGQVCGNSAAV

SEQ ID NO: 8515 - protein, 15 aa, synthetic construct
GAARPRPRALQGAGE

SEQ ID NO: 8516 - protein, 15 aa, synthetic construct
GAARREPGARPRDPG

SEQ ID NO: 8517 - protein, 15 aa, synthetic construct
GAARRLPAAGAGGAG

SEQ ID NO: 8518 - protein, 15 aa, synthetic construct
GAARRPEGRRRGLAP

SEQ ID NO: 8519 - protein, 15 aa, synthetic construct
GAARSLAPSGGSPAS

SEQ ID NO: 8520 - protein, 15 aa, synthetic construct
GAASCWRARLRGGEH

SEQ ID NO: 8521 - protein, 15 aa, synthetic construct
GAASGAGTHRGDHPR

SEQ ID NO: 8522 - protein, 15 aa, synthetic construct
GAASRPPRPALRRGA

SEQ ID NO: 8523 - protein, 15 aa, synthetic construct
GAATCVPANHAAPAT

SEQ ID NO: 8524 - protein, 15 aa, synthetic construct
GAAVLAAAAGTAPVA

SEQ ID NO: 8525 - protein, 15 aa, synthetic construct
GAAVLRRHPARAPGR

SEQ ID NO: 8526 - protein, 15 aa, synthetic construct
GAAVQPAPVRVAAGG

SEQ ID NO: 8527 - protein, 15 aa, synthetic construct
GAAVRAEAEPGVSRP

SEQ ID NO: 8528 - protein, 15 aa, synthetic construct
GAAVVAAPLLSMQQV

SEQ ID NO: 8529 - protein, 15 aa, synthetic construct
GAAWPRGAAGGRGQE

SEQ ID NO: 8530 - protein, 15 aa, synthetic construct
GAAWTQGLGSRVFPS

SEQ ID NO: 8531 - protein, 15 aa, synthetic construct
GAAYTHPGRQPRENP

SEQ ID NO: 8532 - protein, 15 aa, synthetic construct
GACGQQLPLPSHLFP

SEQ ID NO: 8533 - protein, 15 aa, synthetic construct
GADLLSHRPSGAFVF

SEQ ID NO: 8534 - protein, 15 aa, synthetic construct
GADRLPGSLLREHGP

SEQ ID NO: 8535 - protein, 15 aa, synthetic construct
GAEEGHQRCIYRHAA

SEQ ID NO: 8536 - protein, 15 aa, synthetic construct
GAEPKLAGEEEPQRP

SEQ ID NO: 8537 - protein, 15 aa, synthetic construct
GAEWSHHGPGARCPA

SEQ ID NO: 8538 - protein, 15 aa, synthetic construct
GAGAAAPAAAALDSG

SEQ ID NO: 8539 - protein, 15 aa, synthetic construct
GAGAADAAALPQLVL

SEQ ID NO: 8540 - protein, 15 aa, synthetic construct
GAGAELRAGADPRPR

SEQ ID NO: 8541 - protein, 15 aa, synthetic construct
GAGAIPRRVRPGGQA

SEQ ID NO: 8542 - protein, 15 aa, synthetic construct
GAGARGGFRAVSAPG

SEQ ID NO: 8543 - protein, 15 aa, synthetic construct
GAGASRPTIASATAC

SEQ ID NO: 8544 - protein, 15 aa, synthetic construct
GAGCSTVAPSAFPTW

SEQ ID NO: 8545 - protein, 15 aa, synthetic construct
GAGDGAGAVSGDLQP

SEQ ID NO: 8546 - protein, 15 aa, synthetic construct
GAGEELGPHGALPRA

SEQ ID NO: 8547 - protein, 15 aa, synthetic construct
GAGGAVPSAAGPSGP

SEQ ID NO: 8548 - protein, 15 aa, synthetic construct
GAGGFCASPGARSAP

SEQ ID NO: 8549 - protein, 15 aa, synthetic construct
GAGGSCNPGCPERGA

SEQ ID NO: 8550 - protein, 15 aa, synthetic construct
GAGHCRSCPREVRAG

SEQ ID NO: 8551 - protein, 15 aa, synthetic construct
GAGLLDAVGAHFSSA

SEQ ID NO: 8552 - protein, 15 aa, synthetic construct
GAGPAAPAAPAAPGA

SEQ ID NO: 8553 - protein, 15 aa, synthetic construct
GAGPAPEAPSPPTRN

SEQ ID NO: 8554 - protein, 15 aa, synthetic construct
GAGPGAPLAGPAAAA

SEQ ID NO: 8555 - protein, 15 aa, synthetic construct
GAGPRRAPGCAPRRG

SEQ ID NO: 8556 - protein, 15 aa, synthetic construct
GAGPVGGARRRLCSK

SEQ ID NO: 8557 - protein, 15 aa, synthetic construct
GAGSPLCALRHGHEL

SEQ ID NO: 8558 - protein, 15 aa, synthetic construct
GAGSRFSEAFRELPQ

SEQ ID NO: 8559 - protein, 15 aa, synthetic construct
GAGSSHEPGRGPQRS

SEQ ID NO: 8560 - protein, 15 aa, synthetic construct
GAHWRGSWHLHPQSS

SEQ ID NO: 8561 - protein, 15 aa, synthetic construct
GAIGPCMPAAATAAS

SEQ ID NO: 8562 - protein, 15 aa, synthetic construct
GALAEPPQSVRLLRG

SEQ ID NO: 8563 - protein, 15 aa, synthetic construct
GALPRPRSQRKGARL

SEQ ID NO: 8564 - protein, 15 aa, synthetic construct
GAMRPRAADAADHGR

SEQ ID NO: 8565 - protein, 15 aa, synthetic construct
GANGLAAAPRGPGAP

SEQ ID NO: 8566 - protein, 15 aa, synthetic construct
GAPAQARRVPGQRHL

SEQ ID NO: 8567 - protein, 15 aa, synthetic construct
GAPARARAAPPAAAA

SEQ ID NO: 8568 - protein, 15 aa, synthetic construct
GAPARVVLLAAAPAH

SEQ ID NO: 8569 - protein, 15 aa, synthetic construct
GAPCGQPPGRAARAA

SEQ ID NO: 8570 - protein, 15 aa, synthetic construct
GAPDAGEPPASSQAH

SEQ ID NO: 8571 - protein, 15 aa, synthetic construct
GAPDGSGGSGQRLSG

SEQ ID NO: 8572 - protein, 15 aa, synthetic construct
GAPDHSEEDEAERAG

SEQ ID NO: 8573 - protein, 15 aa, synthetic construct
GAPEEVCHTCCQAPP

SEQ ID NO: 8574 - protein, 15 aa, synthetic construct
GAPGAAGQCALHLRA

SEQ ID NO: 8575 - protein, 15 aa, synthetic construct
GAPGAALLGFVGRSF

SEQ ID NO: 8576 - protein, 15 aa, synthetic construct
GAPGAGAGRRPRRTA

SEQ ID NO: 8577 - protein, 15 aa, synthetic construct
GAPGALARLEGPRPH

SEQ ID NO: 8578 - protein, 15 aa, synthetic construct
GAPGARADPAELAGS

SEQ ID NO: 8579 - protein, 15 aa, synthetic construct
GAPGCRGGRARAAGG

SEQ ID NO: 8580 - protein, 15 aa, synthetic construct
GAPGGPSPPATVPAP

SEQ ID NO: 8581 - protein, 15 aa, synthetic construct
GAPGGRAAAAAGAAA

SEQ ID NO: 8582 - protein, 15 aa, synthetic construct
GAPGHHGQGAAMPTH

SEQ ID NO: 8583 - protein, 15 aa, synthetic construct
GAPGLAAGAARGPGG

SEQ ID NO: 8584 - protein, 15 aa, synthetic construct
GAPGLEAAAAGAPVV

SEQ ID NO: 8585 - protein, 15 aa, synthetic construct
GAPGLLQRRWLRPAL

SEQ ID NO: 8586 - protein, 15 aa, synthetic construct
GAPGSAPPPPGSRRA

SEQ ID NO: 8587 - protein, 15 aa, synthetic construct
GAPGVPRREAPAALR

SEQ ID NO: 8588 - protein, 15 aa, synthetic construct
GAPHSLPEHHRPGGS

SEQ ID NO: 8589 - protein, 15 aa, synthetic construct
GAPPFWAGGRASRGP

SEQ ID NO: 8590 - protein, 15 aa, synthetic construct
GAPQRRWRPAAAPVL

SEQ ID NO: 8591 - protein, 15 aa, synthetic construct
GAPRARSRASPTSAS

SEQ ID NO: 8592 - protein, 15 aa, synthetic construct
GAPRDPPAAQSSQEA

SEQ ID NO: 8593 - protein, 15 aa, synthetic construct
GAPSGQGYRALAWPC

SEQ ID NO: 8594 - protein, 15 aa, synthetic construct
GAPWRRRLPTQQRPA

SEQ ID NO: 8595 - protein, 15 aa, synthetic construct
GARAPPPRCSRCCCC

SEQ ID NO: 8596 - protein, 15 aa, synthetic construct
GARAPSARASVRVPR

SEQ ID NO: 8597 - protein, 15 aa, synthetic construct
GARPAPRARHSGGAA

SEQ ID NO: 8598 - protein, 15 aa, synthetic construct
GARPGPGLPRALRRG

SEQ ID NO: 8599 - protein, 15 aa, synthetic construct
GARPQPQPAARPGRR

SEQ ID NO: 8600 - protein, 15 aa, synthetic construct
GASAALRDQPEPRPR

SEQ ID NO: 8601 - protein, 15 aa, synthetic construct
GAVAAAGARADPRAD

SEQ ID NO: 8602 - protein, 15 aa, synthetic construct
GAVAAAVARAGKGGR

SEQ ID NO: 8603 - protein, 15 aa, synthetic construct
GAVAAVRPLAHRLQG

SEQ ID NO: 8604 - protein, 15 aa, synthetic construct
GAVAPAVRAVGDVAP

SEQ ID NO: 8605 - protein, 15 aa, synthetic construct
GAVAPMHPLAHPVPG

SEQ ID NO: 8606 - protein, 15 aa, synthetic construct
GAVAVSGRGAAVAAA

SEQ ID NO: 8607 - protein, 15 aa, synthetic construct
GAVCAPASHRNWPRC

SEQ ID NO: 8608 - protein, 15 aa, synthetic construct
GAVEAGGPGRRRLWP

SEQ ID NO: 8609 - protein, 15 aa, synthetic construct
GAVLDPGGVHHPPAR

SEQ ID NO: 8610 - protein, 15 aa, synthetic construct
GAVLGSYSPEPPTSA

SEQ ID NO: 8611 - protein, 15 aa, synthetic construct
GAVLLPPSHPNPPSP

SEQ ID NO: 8612 - protein, 15 aa, synthetic construct
GAVPAVVRAERGRQR

SEQ ID NO: 8613 - protein, 15 aa, synthetic construct
GAVPQEAAGLPVLLL

SEQ ID NO: 8614 - protein, 15 aa, synthetic construct
GAVRAVAARPRGHCV

SEQ ID NO: 8615 - protein, 15 aa, synthetic construct
GDGCHKEPGPDSLDS

SEQ ID NO: 8616 - protein, 15 aa, synthetic construct
GGAGGAGGAGGSSRV

SEQ ID NO: 8617 - protein, 15 aa, synthetic construct
GGAPAPGRGRRRLIG

SEQ ID NO: 8618 - protein, 15 aa, synthetic construct
GGAPQPCSPDVHRDP

SEQ ID NO: 8619 - protein, 15 aa, synthetic construct
GGGGGGGSSSGGCGR

SEQ ID NO: 8620 - protein, 15 aa, synthetic construct
GGLRPWPSAAGQAAD

SEQ ID NO: 8621 - protein, 15 aa, synthetic construct
GKRDVLPKAEADFPD

SEQ ID NO: 8622 - protein, 15 aa, synthetic construct
GLPASGRSSFEAFPS

SEQ ID NO: 8623 - protein, 15 aa, synthetic construct
GNCKLHQGDRICSHW

SEQ ID NO: 8624 - protein, 15 aa, synthetic construct
GNCRQPAPTAGKRGP

SEQ ID NO: 8625 - protein, 15 aa, synthetic construct
GNVSHPSVLQSGSLN

SEQ ID NO: 8626 - protein, 15 aa, synthetic construct
GPAAAPRLHRSVPGA

SEQ ID NO: 8627 - protein, 15 aa, synthetic construct
GPAADDQLAEGPDAR

SEQ ID NO: 8628 - protein, 15 aa, synthetic construct
GPAAGPAPSPEAAAG

SEQ ID NO: 8629 - protein, 15 aa, synthetic construct
GPAALAVPGPPGALG

SEQ ID NO: 8630 - protein, 15 aa, synthetic construct
GPAAVGGGAGAVGAV

SEQ ID NO: 8631 - protein, 15 aa, synthetic construct
GPAAVPGVPDGGAGP

SEQ ID NO: 8632 - protein, 15 aa, synthetic construct
GPAQGPGGGLGAQPV

SEQ ID NO: 8633 - protein, 15 aa, synthetic construct
GPARQNLQGLPGGAG

SEQ ID NO: 8634 - protein, 15 aa, synthetic construct
GPASLCPPEAAGVSA

SEQ ID NO: 8635 - protein, 15 aa, synthetic construct
GPASQAGASPPDAFA

SEQ ID NO: 8636 - protein, 15 aa, synthetic construct
GPAVGRAESLATVGG

SEQ ID NO: 8637 - protein, 15 aa, synthetic construct
GPCLRACARPGPAPL

SEQ ID NO: 8638 - protein, 15 aa, synthetic construct
GPEAAAPPLPVLGLA

SEQ ID NO: 8639 - protein, 15 aa, synthetic construct
GPGAAPPGLGALLGR

SEQ ID NO: 8640 - protein, 15 aa, synthetic construct
GPGACPSLATSSLWT

SEQ ID NO: 8641 - protein, 15 aa, synthetic construct
GPGAGQRELELGPGS

SEQ ID NO: 8642 - protein, 15 aa, synthetic construct
GPGALGCGPVSPPAA

SEQ ID NO: 8643 - protein, 15 aa, synthetic construct
GPGCAGGAGAVAWWV

SEQ ID NO: 8644 - protein, 15 aa, synthetic construct
GPGHSEPFAPGQRRL

SEQ ID NO: 8645 - protein, 15 aa, synthetic construct
GPGPALPVAAAAAVG

SEQ ID NO: 8646 - protein, 15 aa, synthetic construct
GPGSVVAPRPHPLAC

SEQ ID NO: 8647 - protein, 15 aa, synthetic construct
GPGTGPAPEPRDAAA

SEQ ID NO: 8648 - protein, 15 aa, synthetic construct
GPGTPSGRSGAVPAA

SEQ ID NO: 8649 - protein, 15 aa, synthetic construct
GPGVRGCPCSRFFPL

SEQ ID NO: 8650 - protein, 15 aa, synthetic construct
GPGWGSHLTCLPGPA

SEQ ID NO: 8651 - protein, 15 aa, synthetic construct
GPLLWQDVPAALHAG

SEQ ID NO: 8652 - protein, 15 aa, synthetic construct
GPMLLLHGGDVVPAP

SEQ ID NO: 8653 - protein, 15 aa, synthetic construct
GPNLAATAQPAGARL

SEQ ID NO: 8654 - protein, 15 aa, synthetic construct
GPPTVALLPGHLLHH

SEQ ID NO: 8655 - protein, 15 aa, synthetic construct
GPQNRHAGTARVVAA

SEQ ID NO: 8656 - protein, 15 aa, synthetic construct
GPQQGRTGHVRPGRS

SEQ ID NO: 8657 - protein, 15 aa, synthetic construct
GPQVAVGAAYHPADR

SEQ ID NO: 8658 - protein, 15 aa, synthetic construct
GPRSSAAPAGGHSLA

SEQ ID NO: 8659 - protein, 15 aa, synthetic construct
GPSQHASPDGGRWPG

SEQ ID NO: 8660 - protein, 15 aa, synthetic construct
GPSVQAQEGAAPAEE

SEQ ID NO: 8661 - protein, 15 aa, synthetic construct
GPTELFLGVRICVAW

SEQ ID NO: 8662 - protein, 15 aa, synthetic construct
GRALASWMEVRSFLW

SEQ ID NO: 8663 - protein, 15 aa, synthetic construct
GRFGGAGGERRFLQP

SEQ ID NO: 8664 - protein, 15 aa, synthetic construct
GRGAWLAAAAEHRAV

SEQ ID NO: 8665 - protein, 15 aa, synthetic construct
GRGGGRGGGRGPGSG

SEQ ID NO: 8666 - protein, 15 aa, synthetic construct
GSPAAAAAAAAAPHL

SEQ ID NO: 8667 - protein, 15 aa, synthetic construct
GSPAAVLEPPAKIRP

SEQ ID NO: 8668 - protein, 15 aa, synthetic construct
GSPACCPVCTRPVVP

SEQ ID NO: 8669 - protein, 15 aa, synthetic construct
GSPAGRAPPCGLAGP

SEQ ID NO: 8670 - protein, 15 aa, synthetic construct
GSPARAVPLRSPRKL

SEQ ID NO: 8671 - protein, 15 aa, synthetic construct
GSPDGPAWVTAAAPA

SEQ ID NO: 8672 - protein, 15 aa, synthetic construct
GSPVTLVDSSRSGRG

SEQ ID NO: 8673 - protein, 15 aa, synthetic construct
GSVLQSAAAAFRGPR

SEQ ID NO: 8674 - protein, 15 aa, synthetic construct
GTPPAGALGAGCRPL

SEQ ID NO: 8675 - protein, 15 aa, synthetic construct
GTRKANRNLRILPPG

SEQ ID NO: 8676 - protein, 15 aa, synthetic construct
GVPAATSPQTLGDPP

SEQ ID NO: 8677 - protein, 15 aa, synthetic construct
GVPPGGVSEASGSCS

SEQ ID NO: 8678 - protein, 15 aa, synthetic construct
HHEAGLCPHGLGPLP

SEQ ID NO: 8679 - protein, 15 aa, synthetic construct
IAPVAPNAWFLSVSS

SEQ ID NO: 8680 - protein, 15 aa, synthetic construct
KVREKLPSCILVSWA

SEQ ID NO: 8681 - protein, 15 aa, synthetic construct
LACTWRARAQGRAEA

SEQ ID NO: 8682 - protein, 15 aa, synthetic construct
LALDPPWVSNQGCRE

SEQ ID NO: 8683 - protein, 15 aa, synthetic construct
LAPAPAAAAVAAAAR

SEQ ID NO: 8684 - protein, 15 aa, synthetic construct
LGGAAGRPGASMGTR

SEQ ID NO: 8685 - protein, 15 aa, synthetic construct
LHGPQRPGPAGHHHQ

SEQ ID NO: 8686 - protein, 15 aa, synthetic construct
LLDSRTFLRVGQPCQ

SEQ ID NO: 8687 - protein, 15 aa, synthetic construct
LQWLLSCALRGQLIL

SEQ ID NO: 8688 - protein, 15 aa, synthetic construct
PAGGGHGGGCSALWG

SEQ ID NO: 8689 - protein, 15 aa, synthetic construct
PGLLLPARLPGLRGR

SEQ ID NO: 8690 - protein, 15 aa, synthetic construct
PGPAAAAPCAACSAA

SEQ ID NO: 8691 - protein, 15 aa, synthetic construct
PGPGLRAVRPPALLP

SEQ ID NO: 8692 - protein, 15 aa, synthetic construct
PGPLLRPPPRLHLLR

SEQ ID NO: 8693 - protein, 15 aa, synthetic construct
PGPRPSPEWRQRPWR

SEQ ID NO: 8694 - protein, 15 aa, synthetic construct
PGPSRPAWRTWTITT

SEQ ID NO: 8695 - protein, 15 aa, synthetic construct
PGPSSAAHGHRLLLR

SEQ ID NO: 8696 - protein, 15 aa, synthetic construct
PGRRLPALSGRHPPL

SEQ ID NO: 8697 - protein, 15 aa, synthetic construct
PGSSISPQPTARAAR

SEQ ID NO: 8698 - protein, 15 aa, synthetic construct
PGSSRPQAGPSGSGS

SEQ ID NO: 8699 - protein, 15 aa, synthetic construct
PPPPPPPPPLGRRRP

SEQ ID NO: 8700 - protein, 15 aa, synthetic construct
PPPSAPLTNPAAVES

SEQ ID NO: 8701 - protein, 15 aa, synthetic construct
PQWPAQAPPAPAASQ

SEQ ID NO: 8702 - protein, 15 aa, synthetic construct
PRDGAGGALPPAAGA

SEQ ID NO: 8703 - protein, 15 aa, synthetic construct
PTPSSGRRPDWRRRC

SEQ ID NO: 8704 - protein, 15 aa, synthetic construct
RGRAGRPGAPGLLPR

SEQ ID NO: 8705 - protein, 15 aa, synthetic construct
RHSMTGRSACGDWRP

SEQ ID NO: 8706 - protein, 15 aa, synthetic construct
RLPRAQPARGRPRRA

SEQ ID NO: 8707 - protein, 15 aa, synthetic construct
RPRGVRAWIPAREPG

SEQ ID NO: 8708 - protein, 15 aa, synthetic construct
RRERQRQRGAGRGPR

SEQ ID NO: 8709 - protein, 15 aa, synthetic construct
RRRKSLASAPRSQSQ

SEQ ID NO: 8710 - protein, 15 aa, synthetic construct
RRRRRSSTASPSPAS

SEQ ID NO: 8711 - protein, 15 aa, synthetic construct
SAAATHKLRGGALRL

SEQ ID NO: 8712 - protein, 15 aa, synthetic construct
SAPLTSPLSNRSPLQ

SEQ ID NO: 8713 - protein, 15 aa, synthetic construct
SCRGCEPRSRSGYGA

SEQ ID NO: 8714 - protein, 15 aa, synthetic construct
SLETPLHKKKMRTMI

SEQ ID NO: 8715 - protein, 15 aa, synthetic construct
SLLSAGRDRQRFLRR

SEQ ID NO: 8716 - protein, 15 aa, synthetic construct
SLPSSVSTVARAREP

SEQ ID NO: 8717 - protein, 15 aa, synthetic construct
SPKGQGIPRRRQRRR

SEQ ID NO: 8718 - protein, 15 aa, synthetic construct
SRRLTCPAARQLRSG

SEQ ID NO: 8719 - protein, 15 aa, synthetic construct
SSHGAPSVVSHTERG

SEQ ID NO: 8720 - protein, 15 aa, synthetic construct
TITACPTNVVNLTTL

SEQ ID NO: 8721 - protein, 15 aa, synthetic construct
TLAAASPAAAAPAAV

SEQ ID NO: 8722 - protein, 15 aa, synthetic construct
TLAAGRSCKMEGCRW

SEQ ID NO: 8723 - protein, 15 aa, synthetic construct
TLALGRWRTRQCSLE

SEQ ID NO: 8724 - protein, 15 aa, synthetic construct
TLCGRGCSGGGSRTR

SEQ ID NO: 8725 - protein, 15 aa, synthetic construct
TLERQEHGPALTPAS

SEQ ID NO: 8726 - protein, 15 aa, synthetic construct
TLESTAGYAIGAHHL

SEQ ID NO: 8727 - protein, 15 aa, synthetic construct
TLGPFPGFWGKFLSL

SEQ ID NO: 8728 - protein, 15 aa, synthetic construct
TLGPSFPGPGHPTQQ

SEQ ID NO: 8729 - protein, 15 aa, synthetic construct
TLGVCDNFAGKPPHH

SEQ ID NO: 8730 - protein, 15 aa, synthetic construct
TLHFTTSSKFFLYIF

SEQ ID NO: 8731 - protein, 15 aa, synthetic construct
TLLLPAGSASARSPR

SEQ ID NO: 8732 - protein, 15 aa, synthetic construct
TLLSLAPYSISPAFL

SEQ ID NO: 8733 - protein, 15 aa, synthetic construct
TLLSPQGAEPGRAGG

SEQ ID NO: 8734 - protein, 15 aa, synthetic construct
TLPGEDWLRVRGLPG

SEQ ID NO: 8735 - protein, 15 aa, synthetic construct
TLPRLLPLCPRWALS

SEQ ID NO: 8736 - protein, 15 aa, synthetic construct
TLRGPDPAAPGREGP

SEQ ID NO: 8737 - protein, 15 aa, synthetic construct
TLRHGRDDPLQGRGR

SEQ ID NO: 8738 - protein, 15 aa, synthetic construct
TLRKARASDPPLHNV

SEQ ID NO: 8739 - protein, 15 aa, synthetic construct
TLRLQVFPGELAAGL

SEQ ID NO: 8740 - protein, 15 aa, synthetic construct
TLRYQMPRGCHLGTP

SEQ ID NO: 8741 - protein, 15 aa, synthetic construct
TLSTCSPRPNGQTPT

SEQ ID NO: 8742 - protein, 15 aa, synthetic construct
WAAGAPSVVRAGQRA

SEQ ID NO: 8743 - protein, 15 aa, synthetic construct
WAPPQPLPVEGTGPG

SEQ ID NO: 8744 - protein, 15 aa, synthetic construct
WCGLKQTVFQALTEK

SEQ ID NO: 8745 - protein, 15 aa, synthetic construct
WEAVQARGGAFRIPR

SEQ ID NO: 8746 - protein, 15 aa, synthetic construct
WEGSGVLDGGAFLSV

SEQ ID NO: 8747 - protein, 15 aa, synthetic construct
WEVELVQRARSQPKD

SEQ ID NO: 8748 - protein, 15 aa, synthetic construct
WGMSWHLALWALQLG

SEQ ID NO: 8749 - protein, 15 aa, synthetic construct
WKRPQSGRFHVCRLW

SEQ ID NO: 8750 - protein, 15 aa, synthetic construct
WPPGLRQVLGAAGPA

SEQ ID NO: 8751 - protein, 15 aa, synthetic construct
WVGAGPGDGEGDRRQ

SEQ ID NO: 8752 - protein, 15 aa, synthetic construct
YPAVQVPAAAGSSPG

SEQ ID NO: 8753 - protein, 15 aa, synthetic construct
AAGSPEPAAHTSLGT

SEQ ID NO: 8754 - protein, 15 aa, synthetic construct
ASLVTCLTSSDLRTP

SEQ ID NO: 8755 - protein, 15 aa, synthetic construct
ASPAAPSPAAVSPAV

SEQ ID NO: 8756 - protein, 15 aa, synthetic construct
ASRWPPSTASSPNAL

SEQ ID NO: 8757 - protein, 15 aa, synthetic construct
CPHSTGLPSPHACVF

SEQ ID NO: 8758 - protein, 15 aa, synthetic construct
CPLPRPEVKAGVRSA

SEQ ID NO: 8759 - protein, 15 aa, synthetic construct
GGAAARPPAPPARTL

SEQ ID NO: 8760 - protein, 15 aa, synthetic construct
GGGGPGPGPDPGPGL

SEQ ID NO: 8761 - protein, 15 aa, synthetic construct
GGGGPWWRRPGRRPE

SEQ ID NO: 8762 - protein, 15 aa, synthetic construct
GGRRRRGRSGRRRRW

SEQ ID NO: 8763 - protein, 15 aa, synthetic construct
GGRRVRRLCAERCRG

SEQ ID NO: 8764 - protein, 15 aa, synthetic construct
GRKRRRRRRRGAQTT

SEQ ID NO: 8765 - protein, 15 aa, synthetic construct
GRRGRRRRGRDPVSE

SEQ ID NO: 8766 - protein, 15 aa, synthetic construct
HLRRRRRRRGRRRRC

SEQ ID NO: 8767 - protein, 15 aa, synthetic construct
KGRRRKRRKRMQRKT

SEQ ID NO: 8768 - protein, 15 aa, synthetic construct
MEPGAFSGARPGLGG

SEQ ID NO: 8769 - protein, 15 aa, synthetic construct
PGALQGAGHHSVRPQ

SEQ ID NO: 8770 - protein, 15 aa, synthetic construct
PSGVHAGLEAFGPAL

SEQ ID NO: 8771 - protein, 15 aa, synthetic construct
RGRGRRRRRAARRRA

SEQ ID NO: 8772 - protein, 15 aa, synthetic construct
RGRRRGRRRRRGRQG

SEQ ID NO: 8773 - protein, 15 aa, synthetic construct
RPPRARGPVRAQGGG

SEQ ID NO: 8774 - protein, 15 aa, synthetic construct
RRGRRRRRRAPSARR

SEQ ID NO: 8775 - protein, 15 aa, synthetic construct
RRRGRRRQGRGAALP

SEQ ID NO: 8776 - protein, 15 aa, synthetic construct
RRRKRRRRRRAEGLG

SEQ ID NO: 8777 - protein, 15 aa, synthetic construct
RRRRRQRRRRRQQRQ

SEQ ID NO: 8778 - protein, 15 aa, synthetic construct
RRRRRRQRSQRQQQR

SEQ ID NO: 8779 - protein, 15 aa, synthetic construct
WSGGRWWGQDWGPGP

SEQ ID NO: 8780 - protein, 15 aa, synthetic construct
AAAAAAAASALPATP

SEQ ID NO: 8781 - protein, 15 aa, synthetic construct
AAPGAPQARVPVAAV

SEQ ID NO: 8782 - protein, 15 aa, synthetic construct
AAPGLWVPRRTRPAS

SEQ ID NO: 8783 - protein, 15 aa, synthetic construct
AAPRPWTPPAPGSVH

SEQ ID NO: 8784 - protein, 15 aa, synthetic construct
ACPEAVRCSCSESRS

SEQ ID NO: 8785 - protein, 15 aa, synthetic construct
ADPSAASLCAASPPA

SEQ ID NO: 8786 - protein, 15 aa, synthetic construct
AGHGGEGPRGLREAE

SEQ ID NO: 8787 - protein, 15 aa, synthetic construct
ALGPLRAGLPRRLVR

SEQ ID NO: 8788 - protein, 15 aa, synthetic construct
AQWPPPPSPEPPAFR

SEQ ID NO: 8789 - protein, 15 aa, synthetic construct
AVAATVATVAPCERN

SEQ ID NO: 8790 - protein, 15 aa, synthetic construct
CAPRRGTGHRADPQR

SEQ ID NO: 8791 - protein, 15 aa, synthetic construct
CPRPPPPSSARSRSW

SEQ ID NO: 8792 - protein, 15 aa, synthetic construct
CQLPSGSTGVEASLT

SEQ ID NO: 8793 - protein, 15 aa, synthetic construct
CWMAHCSPRGLTAPG

SEQ ID NO: 8794 - protein, 15 aa, synthetic construct
DPPAAAPSAGLSARV

SEQ ID NO: 8795 - protein, 15 aa, synthetic construct
EKAQRAQCIDWFGWG

SEQ ID NO: 8796 - protein, 15 aa, synthetic construct
FSLGTASTSTAKDEV

SEQ ID NO: 8797 - protein, 15 aa, synthetic construct
GEGAGAAGGGPHRAP

SEQ ID NO: 8798 - protein, 15 aa, synthetic construct
GGSEQRHRRRCMRGP

SEQ ID NO: 8799 - protein, 15 aa, synthetic construct
GIPESAGRPGGRGRV

SEQ ID NO: 8800 - protein, 15 aa, synthetic construct
GPGAAAPGPGEQRLP

SEQ ID NO: 8801 - protein, 15 aa, synthetic construct
GPGPAGPTRAAQPRP

SEQ ID NO: 8802 - protein, 15 aa, synthetic construct
GRGSTRSARLATQAR

SEQ ID NO: 8803 - protein, 15 aa, synthetic construct
HPPVPAGTAGGGRAA

SEQ ID NO: 8804 - protein, 15 aa, synthetic construct
LGRRRLLSLGRRRLS

SEQ ID NO: 8805 - protein, 15 aa, synthetic construct
LPDDVSGRPVLGPAP

SEQ ID NO: 8806 - protein, 15 aa, synthetic construct
LWGRRRRWLWGRRRR

SEQ ID NO: 8807 - protein, 15 aa, synthetic construct
PAAGAAERAGRRWRG

SEQ ID NO: 8808 - protein, 15 aa, synthetic construct
PAAGLCLLPAARCHY

SEQ ID NO: 8809 - protein, 15 aa, synthetic construct
PAAGRGTRELGCRGR

SEQ ID NO: 8810 - protein, 15 aa, synthetic construct
PAPRRAPDANGRTSG

SEQ ID NO: 8811 - protein, 15 aa, synthetic construct
PASGSRSRFGSRCCW

SEQ ID NO: 8812 - protein, 15 aa, synthetic construct
PETPISLTSRKVRVG

SEQ ID NO: 8813 - protein, 15 aa, synthetic construct
PGASDFMGGPSRGNR

SEQ ID NO: 8814 - protein, 15 aa, synthetic construct
PGGGEAAVREAALLR

SEQ ID NO: 8815 - protein, 15 aa, synthetic construct
PPARACFPSARVHAA

SEQ ID NO: 8816 - protein, 15 aa, synthetic construct
PPPPPIMARIKVWRR

SEQ ID NO: 8817 - protein, 15 aa, synthetic construct
PSAAWGRVADAHFLS

SEQ ID NO: 8818 - protein, 15 aa, synthetic construct
PSSAGQCSWFLSCCC

SEQ ID NO: 8819 - protein, 15 aa, synthetic construct
PSVPPAPLLRRCGIP

SEQ ID NO: 8820 - protein, 15 aa, synthetic construct
PTPRSGSTSRASATS

SEQ ID NO: 8821 - protein, 15 aa, synthetic construct
QPEKEAQERPKQSPP

SEQ ID NO: 8822 - protein, 15 aa, synthetic construct
QRRRRRRPRLFQPPP

SEQ ID NO: 8823 - protein, 15 aa, synthetic construct
REEQRGRLRLRRRRL

SEQ ID NO: 8824 - protein, 15 aa, synthetic construct
RRAASRATAPPRPFP

SEQ ID NO: 8825 - protein, 15 aa, synthetic construct
RRPMATAAATPGRKA

SEQ ID NO: 8826 - protein, 15 aa, synthetic construct
RRRLGRLRLASRHCR

SEQ ID NO: 8827 - protein, 15 aa, synthetic construct
RRRPGAARVRRRRRC

SEQ ID NO: 8828 - protein, 15 aa, synthetic construct
RRRPPCRRPRRRPGL

SEQ ID NO: 8829 - protein, 15 aa, synthetic construct
RRRPPRRRPRRRGAA

SEQ ID NO: 8830 - protein, 15 aa, synthetic construct
SFPSSRVAMYDCMET

SEQ ID NO: 8831 - protein, 15 aa, synthetic construct
SGSAPATPRPRRPRG

SEQ ID NO: 8832 - protein, 15 aa, synthetic construct
SRLPAWRRPPAPGAA

SEQ ID NO: 8833 - protein, 15 aa, synthetic construct
VRVRQPQEGHQIRQV

SEQ ID NO: 8834 - protein, 15 aa, synthetic construct
VSRRSLRAQRPGHQD

SEQ ID NO: 8835 - protein, 15 aa, synthetic construct
WAASGCWGPAQAPAA

SEQ ID NO: 8836 - protein, 15 aa, synthetic construct
WAGRGGAGGGRAAHR

SEQ ID NO: 8837 - protein, 15 aa, synthetic construct
WPGLNPECTPCNSSP

SEQ ID NO: 8838 - protein, 15 aa, synthetic construct
WPPTKISPSHKTWRS

SEQ ID NO: 8839 - protein, 15 aa, synthetic construct
WPWPGWARGSGRRSG

SEQ ID NO: 8840 - protein, 15 aa, synthetic construct
WQEECLRLITPSSIL

SEQ ID NO: 8841 - protein, 15 aa, synthetic construct
WRPPAAPGDPCCCYC

SEQ ID NO: 8842 - protein, 15 aa, synthetic construct
WRRAPRPRCPRTHSA

SEQ ID NO: 8843 - protein, 15 aa, synthetic construct
WRRPSWSPACWGSCC

SEQ ID NO: 8844 - protein, 15 aa, synthetic construct
WRTLLPGPTAPVAWT

SEQ ID NO: 8845 - protein, 15 aa, synthetic construct
WWVGTAPSPPVYAGP

SEQ ID NO: 8846 - protein, 15 aa, synthetic construct
AAPPAPVPTTAGAVA

SEQ ID NO: 8847 - protein, 15 aa, synthetic construct
AGQQAVPADAAPAAA

SEQ ID NO: 8848 - protein, 15 aa, synthetic construct
ARGGRRGRRGQVGAH

SEQ ID NO: 8849 - protein, 15 aa, synthetic construct
FPFRTALRCRSMGSL

SEQ ID NO: 8850 - protein, 15 aa, synthetic construct
GAGAGGDRGARASGT

SEQ ID NO: 8851 - protein, 15 aa, synthetic construct
GAGRGHGLYRPVGDF

SEQ ID NO: 8852 - protein, 15 aa, synthetic construct
GLGRRALLGRGGREA

SEQ ID NO: 8853 - protein, 15 aa, synthetic construct
GLPRQGVPQRLPQQA

SEQ ID NO: 8854 - protein, 15 aa, synthetic construct
GSCRPSGRAWWRRAS

SEQ ID NO: 8855 - protein, 15 aa, synthetic construct
GVRRVLGRAPGRLRR

SEQ ID NO: 8856 - protein, 15 aa, synthetic construct
HLRPPEPVPRQPPRA

SEQ ID NO: 8857 - protein, 15 aa, synthetic construct
LQQPAARQNERREPG

SEQ ID NO: 8858 - protein, 15 aa, synthetic construct
PRGPGPAGRVPASTR

SEQ ID NO: 8859 - protein, 15 aa, synthetic construct
RAGEEGQGGGLPQGD

SEQ ID NO: 8860 - protein, 15 aa, synthetic construct
SAPTGRPPSTSSTPS

SEQ ID NO: 8861 - protein, 15 aa, synthetic construct
SWSSCRCIGTRSSGT

SEQ ID NO: 8862 - protein, 15 aa, synthetic construct
SWSSSSSQTSQRSKK

SEQ ID NO: 8863 - protein, 15 aa, synthetic construct
TDGPASFAAPAPAPG

SEQ ID NO: 8864 - protein, 15 aa, synthetic construct
TKSLSSSLCPVYISQ

SEQ ID NO: 8865 - protein, 15 aa, synthetic construct
TPGPGPAHSPGPRGC

SEQ ID NO: 8866 - protein, 15 aa, synthetic construct
TTSSRPSWRCWQSWK

SEQ ID NO: 8867 - protein, 15 aa, synthetic construct
WSPKKPLGKKTWSPR

SEQ ID NO: 8868 - protein, 15 aa, synthetic construct
AAAAQHRGGEGARRA

SEQ ID NO: 8869 - protein, 15 aa, synthetic construct
ACHFEPTENGERSHW

SEQ ID NO: 8870 - protein, 15 aa, synthetic construct
AGAAGGRAVGARTEP

SEQ ID NO: 8871 - protein, 15 aa, synthetic construct
ANPKAFPRLHSAPLC

SEQ ID NO: 8872 - protein, 15 aa, synthetic construct
APRSLAGGHGGGRAG

SEQ ID NO: 8873 - protein, 15 aa, synthetic construct
CLCPGSCCPWHWAEA

SEQ ID NO: 8874 - protein, 15 aa, synthetic construct
CRPGPAAVPGEARRR

SEQ ID NO: 8875 - protein, 15 aa, synthetic construct
CSDNVPATGSARASR

SEQ ID NO: 8876 - protein, 15 aa, synthetic construct
DLLPGAECRPGPFLH

SEQ ID NO: 8877 - protein, 15 aa, synthetic construct
DNHPPISPTRQPRQY

SEQ ID NO: 8878 - protein, 15 aa, synthetic construct
FPRPARPPRSPAGHE

SEQ ID NO: 8879 - protein, 15 aa, synthetic construct
GGRLQGPASRRSRAT

SEQ ID NO: 8880 - protein, 15 aa, synthetic construct
GGRRAGLELPAAQRL

SEQ ID NO: 8881 - protein, 15 aa, synthetic construct
GGSWPGRGAGVPPAA

SEQ ID NO: 8882 - protein, 15 aa, synthetic construct
GLALLQKHLPFDHSN

SEQ ID NO: 8883 - protein, 15 aa, synthetic construct
GLPSRDPRAPRAPGG

SEQ ID NO: 8884 - protein, 15 aa, synthetic construct
GRLLPRPPGLLPGRP

SEQ ID NO: 8885 - protein, 15 aa, synthetic construct
GVDPRPFQGRILPQR

SEQ ID NO: 8886 - protein, 15 aa, synthetic construct
GVPRAGLTQQENEEH

SEQ ID NO: 8887 - protein, 15 aa, synthetic construct
PALLQPGRGRPHRRL

SEQ ID NO: 8888 - protein, 15 aa, synthetic construct
PDRGPLCVQRVHRAR

SEQ ID NO: 8889 - protein, 15 aa, synthetic construct
RAAAGLRTGGVPAGA

SEQ ID NO: 8890 - protein, 15 aa, synthetic construct
RAALPGVGGSGGGPR

SEQ ID NO: 8891 - protein, 15 aa, synthetic construct
RADLPALLQPPPPPP

SEQ ID NO: 8892 - protein, 15 aa, synthetic construct
RGGARGAEGGEGGWG

SEQ ID NO: 8893 - protein, 15 aa, synthetic construct
RGGGPPQKEGRCGGG

SEQ ID NO: 8894 - protein, 15 aa, synthetic construct
RGLRGGGRPAAEARA

SEQ ID NO: 8895 - protein, 15 aa, synthetic construct
RRGQAGRRGGRGRGA

SEQ ID NO: 8896 - protein, 15 aa, synthetic construct
RRLPAVRPQRRDLVH

SEQ ID NO: 8897 - protein, 15 aa, synthetic construct
SPGPKDSDAPLWALL

SEQ ID NO: 8898 - protein, 15 aa, synthetic construct
TDNAVRQDRLALCAA

SEQ ID NO: 8899 - protein, 15 aa, synthetic construct
VARRVRPPGGGARAG

SEQ ID NO: 8900 - protein, 15 aa, synthetic construct
WDQRPCHLYCCCSWW

SEQ ID NO: 8901 - protein, 15 aa, synthetic construct
WGPEGRAHTARKRGA

SEQ ID NO: 8902 - protein, 15 aa, synthetic construct
WQPRQLVYLGSGQPL

SEQ ID NO: 8903 - protein, 15 aa, synthetic construct
WTRPRRCCKRRHSSL

SEQ ID NO: 8904 - protein, 15 aa, synthetic construct
AEVVRGPAVLQPLQQ

SEQ ID NO: 8905 - protein, 15 aa, synthetic construct
AGGGGRGAEQGSHLA

SEQ ID NO: 8906 - protein, 15 aa, synthetic construct
ALRHIARRRTRHTAS

SEQ ID NO: 8907 - protein, 15 aa, synthetic construct
APNGARGKPGPHAGA

SEQ ID NO: 8908 - protein, 15 aa, synthetic construct
ARLAAPALRRPAGAA

SEQ ID NO: 8909 - protein, 15 aa, synthetic construct
CPTSAASRATTARRP

SEQ ID NO: 8910 - protein, 15 aa, synthetic construct
CQRPGAPARTSRDGG

SEQ ID NO: 8911 - protein, 15 aa, synthetic construct
DALLPPPLLLPATTP

SEQ ID NO: 8912 - protein, 15 aa, synthetic construct
GAGAAAEPGALRLQV

SEQ ID NO: 8913 - protein, 15 aa, synthetic construct
GGAGGGADGGGGQAR

SEQ ID NO: 8914 - protein, 15 aa, synthetic construct
GGGGGGGGGGRGGGC

SEQ ID NO: 8915 - protein, 15 aa, synthetic construct
GGVLGGCARRPSRGR

SEQ ID NO: 8916 - protein, 15 aa, synthetic construct
GHPAASPAAANPAVP

SEQ ID NO: 8917 - protein, 15 aa, synthetic construct
GHPRHAASRSDPAAH

SEQ ID NO: 8918 - protein, 15 aa, synthetic construct
GLPTDVRAPLPDCDP

SEQ ID NO: 8919 - protein, 15 aa, synthetic construct
GPGAARPPRPAPGRL

SEQ ID NO: 8920 - protein, 15 aa, synthetic construct
GPRLGLPPWLGSSRS

SEQ ID NO: 8921 - protein, 15 aa, synthetic construct
GQESAEFRPRRAGAL

SEQ ID NO: 8922 - protein, 15 aa, synthetic construct
GRRRGAGTAGGTRAA

SEQ ID NO: 8923 - protein, 15 aa, synthetic construct
GSADVRDLQSLELFA

SEQ ID NO: 8924 - protein, 15 aa, synthetic construct
LLPLQGLHLREVHPH

SEQ ID NO: 8925 - protein, 15 aa, synthetic construct
MAQEALAFLMAQGAM

SEQ ID NO: 8926 - protein, 15 aa, synthetic construct
PAEPGALPAGHAGLP

SEQ ID NO: 8927 - protein, 15 aa, synthetic construct
PGSSRAEVSSWPAWG

SEQ ID NO: 8928 - protein, 15 aa, synthetic construct
PQRGAHAAALPRLPG

SEQ ID NO: 8929 - protein, 15 aa, synthetic construct
PSPAAARRPPAPPRR

SEQ ID NO: 8930 - protein, 15 aa, synthetic construct
PSPPTPATPLSQALQ

SEQ ID NO: 8931 - protein, 15 aa, synthetic construct
QAAPGVLRRLPLELR

SEQ ID NO: 8932 - protein, 15 aa, synthetic construct
REGGRQGAGGGRRRR

SEQ ID NO: 8933 - protein, 15 aa, synthetic construct
RLKTLLEMSYRSLGA

SEQ ID NO: 8934 - protein, 15 aa, synthetic construct
RRGRAAGRPGGVQDP

SEQ ID NO: 8935 - protein, 15 aa, synthetic construct
SPSAPFAGTSRWRRS

SEQ ID NO: 8936 - protein, 15 aa, synthetic construct
TAPGSGGAGGGRPRS

SEQ ID NO: 8937 - protein, 15 aa, synthetic construct
WAPIGWRRRWAKDRQ

SEQ ID NO: 8938 - protein, 15 aa, synthetic construct
ACLSRRQSQAPESSA

SEQ ID NO: 8939 - protein, 15 aa, synthetic construct
AGIAAPLWGPGGRPR

SEQ ID NO: 8940 - protein, 15 aa, synthetic construct
APGDHHPAAGPVRQP

SEQ ID NO: 8941 - protein, 15 aa, synthetic construct
ARDRLLLGAAVSGGV

SEQ ID NO: 8942 - protein, 15 aa, synthetic construct
CGALRPGPAATAAAA

SEQ ID NO: 8943 - protein, 15 aa, synthetic construct
CLSVQETVTGPRKLC

SEQ ID NO: 8944 - protein, 15 aa, synthetic construct
CPGRSSPCSWASAAT

SEQ ID NO: 8945 - protein, 15 aa, synthetic construct
DVGRRPGPVSYAWAA

SEQ ID NO: 8946 - protein, 15 aa, synthetic construct
EVPTLLIKVPPLGTP

SEQ ID NO: 8947 - protein, 15 aa, synthetic construct
GKRNEEDWYSQTLPY

SEQ ID NO: 8948 - protein, 15 aa, synthetic construct
GPAGAVAPSTRPRCL

SEQ ID NO: 8949 - protein, 15 aa, synthetic construct
GRQPRQRGLLGGYIP

SEQ ID NO: 8950 - protein, 15 aa, synthetic construct
GSRLRGDHSCDRCGW

SEQ ID NO: 8951 - protein, 15 aa, synthetic construct
KPRLRGGGCGSRLRG

SEQ ID NO: 8952 - protein, 15 aa, synthetic construct
LRRNSQNPSTARRRK

SEQ ID NO: 8953 - protein, 15 aa, synthetic construct
PMVASGHRRWQHKPG

SEQ ID NO: 8954 - protein, 15 aa, synthetic construct
PWPPAGPAQAAFSPS

SEQ ID NO: 8955 - protein, 15 aa, synthetic construct
RDKRAVLRAAALAGP

SEQ ID NO: 8956 - protein, 15 aa, synthetic construct
RPSPRPARGMRADAA

SEQ ID NO: 8957 - protein, 15 aa, synthetic construct
SSALSCRRHEHWHLR

SEQ ID NO: 8958 - protein, 15 aa, synthetic construct
SSAPTLPPLRGHRWS

SEQ ID NO: 8959 - protein, 15 aa, synthetic construct
SSSPTCPLLTSVSSP

SEQ ID NO: 8960 - protein, 15 aa, synthetic construct
SSSPTCPLQTSVSSP

SEQ ID NO: 8961 - protein, 15 aa, synthetic construct
SVLPWGQPGLWFDHH

SEQ ID NO: 8962 - protein, 15 aa, synthetic construct
WPFRCPATHRASESR

SEQ ID NO: 8963 - protein, 15 aa, synthetic construct
WTRAGAAGGPGRARA

SEQ ID NO: 8964 - protein, 15 aa, synthetic construct
AAAAAAAAPALGDKG

SEQ ID NO: 8965 - protein, 15 aa, synthetic construct
AAAAAAAGGPGPGGG

SEQ ID NO: 8966 - protein, 15 aa, synthetic construct
AAAAARPPRAGLAPP

SEQ ID NO: 8967 - protein, 15 aa, synthetic construct
AAAAATAAAAAGGGG

SEQ ID NO: 8968 - protein, 15 aa, synthetic construct
AAAARARVGAGRGGL

SEQ ID NO: 8969 - protein, 15 aa, synthetic construct
AAAASAAAAPAAAPA

SEQ ID NO: 8970 - protein, 15 aa, synthetic construct
AAAASRRRGTRGAPG

SEQ ID NO: 8971 - protein, 15 aa, synthetic construct
AAAASSASSAAAAGT

SEQ ID NO: 8972 - protein, 15 aa, synthetic construct
AAAASTAARRPRRLC

SEQ ID NO: 8973 - protein, 15 aa, synthetic construct
AAAATATAASAAAAA

SEQ ID NO: 8974 - protein, 15 aa, synthetic construct
AAAATCRRSPGPPTA

SEQ ID NO: 8975 - protein, 15 aa, synthetic construct
AAAATWQPHAERRRR

SEQ ID NO: 8976 - protein, 15 aa, synthetic construct
AADATSVGYPCPGGR

SEQ ID NO: 8977 - protein, 15 aa, synthetic construct
AAGATLPAAVGVTEP

SEQ ID NO: 8978 - protein, 15 aa, synthetic construct
AAGATLPVAVGATEP

SEQ ID NO: 8979 - protein, 15 aa, synthetic construct
AARASVQRRQPGEPA

SEQ ID NO: 8980 - protein, 15 aa, synthetic construct
AARLGPAARGPAAPR

SEQ ID NO: 8981 - protein, 15 aa, synthetic construct
AARPAQGALAAHGAS

SEQ ID NO: 8982 - protein, 15 aa, synthetic construct
AATVSQFSRGFVFPE

SEQ ID NO: 8983 - protein, 15 aa, synthetic construct
AFPAAHPARPPVRAA

SEQ ID NO: 8984 - protein, 15 aa, synthetic construct
AGARARGGDVAPKAS

SEQ ID NO: 8985 - protein, 15 aa, synthetic construct
AGAWATAAPLPPRVS

SEQ ID NO: 8986 - protein, 15 aa, synthetic construct
AKPRRSLRRRKRRRR

SEQ ID NO: 8987 - protein, 15 aa, synthetic construct
AMRVSATASTPRPPR

SEQ ID NO: 8988 - protein, 15 aa, synthetic construct
ARARALAPAPGGAGK

SEQ ID NO: 8989 - protein, 15 aa, synthetic construct
ARARAWAGGLLEKPG

SEQ ID NO: 8990 - protein, 15 aa, synthetic construct
ARLRAARGHLPGHVP

SEQ ID NO: 8991 - protein, 15 aa, synthetic construct
ARLRARLDGQASPPA

SEQ ID NO: 8992 - protein, 15 aa, synthetic construct
ARLREVRARRRRVHP

SEQ ID NO: 8993 - protein, 15 aa, synthetic construct
ARLRLDRSVLPRPGL

SEQ ID NO: 8994 - protein, 15 aa, synthetic construct
ARLRPAAHAQRPARA

SEQ ID NO: 8995 - protein, 15 aa, synthetic construct
ARLRQRGPGRSPAGS

SEQ ID NO: 8996 - protein, 15 aa, synthetic construct
ARRPARGLREHFLPG

SEQ ID NO: 8997 - protein, 15 aa, synthetic construct
ATPAARGRPPGRSHG

SEQ ID NO: 8998 - protein, 15 aa, synthetic construct
ATPGPRRLPAAAPRP

SEQ ID NO: 8999 - protein, 15 aa, synthetic construct
AVRPAARAARRALRC

SEQ ID NO: 9000 - protein, 15 aa, synthetic construct
AWGGAAGAAGPELPP

SEQ ID NO: 9001 - protein, 15 aa, synthetic construct
AWGSRSPPSSACHHL

SEQ ID NO: 9002 - protein, 15 aa, synthetic construct
CFITTRAYFTQSHFS

SEQ ID NO: 9003 - protein, 15 aa, synthetic construct
CLPGLRTMKCCTPLA

SEQ ID NO: 9004 - protein, 15 aa, synthetic construct
CPGRRPPRAKGPAPP

SEQ ID NO: 9005 - protein, 15 aa, synthetic construct
CPRRRSATRSRRCAG

SEQ ID NO: 9006 - protein, 15 aa, synthetic construct
CQRPLAARFPGAGTS

SEQ ID NO: 9007 - protein, 15 aa, synthetic construct
CSGPWAGGGRGPRCS

SEQ ID NO: 9008 - protein, 15 aa, synthetic construct
CSPRPRARWATACGT

SEQ ID NO: 9009 - protein, 15 aa, synthetic construct
CTPWLRPDPTRPGGH

SEQ ID NO: 9010 - protein, 15 aa, synthetic construct
DGQCRGVVPHGKRPR

SEQ ID NO: 9011 - protein, 15 aa, synthetic construct
ELRPAAAAAAAEGHQ

SEQ ID NO: 9012 - protein, 15 aa, synthetic construct
ERRPAAHALPAHRRR

SEQ ID NO: 9013 - protein, 15 aa, synthetic construct
GAAAGCVAAGPAGPL

SEQ ID NO: 9014 - protein, 15 aa, synthetic construct
GAGAAAGLRARLGPR

SEQ ID NO: 9015 - protein, 15 aa, synthetic construct
GAGAAGGARSSPSPR

SEQ ID NO: 9016 - protein, 15 aa, synthetic construct
GAGAALPSVPPDLLL

SEQ ID NO: 9017 - protein, 15 aa, synthetic construct
GAGADRGRRDDRKLV

SEQ ID NO: 9018 - protein, 15 aa, synthetic construct
GAGAGARPGTRDHAP

SEQ ID NO: 9019 - protein, 15 aa, synthetic construct
GAGAGGVHLRPADCC

SEQ ID NO: 9020 - protein, 15 aa, synthetic construct
GAGAGQPSPSVPTVA

SEQ ID NO: 9021 - protein, 15 aa, synthetic construct
GAGAGRRGSSPGSGP

SEQ ID NO: 9022 - protein, 15 aa, synthetic construct
GAGAHAVPAAGGWTQ

SEQ ID NO: 9023 - protein, 15 aa, synthetic construct
GAGARGGWTGRDGRQ

SEQ ID NO: 9024 - protein, 15 aa, synthetic construct
GAGARTRLLPADCLA

SEQ ID NO: 9025 - protein, 15 aa, synthetic construct
GAGASWRAASRSDWR

SEQ ID NO: 9026 - protein, 15 aa, synthetic construct
GAGAVAPFRAHSDLR

SEQ ID NO: 9027 - protein, 15 aa, synthetic construct
GDWGPGPHWYPAASG

SEQ ID NO: 9028 - protein, 15 aa, synthetic construct
GFPAAGRRCGEMVLQ

SEQ ID NO: 9029 - protein, 15 aa, synthetic construct
GFRVFGDRGGQLCLH

SEQ ID NO: 9030 - protein, 15 aa, synthetic construct
GGAGATGPAGHERQR

SEQ ID NO: 9031 - protein, 15 aa, synthetic construct
GGFQRRPPRGARGGG

SEQ ID NO: 9032 - protein, 15 aa, synthetic construct
GLGPAAGNALGRPRL

SEQ ID NO: 9033 - protein, 15 aa, synthetic construct
GMLVAAPARAVDSHA

SEQ ID NO: 9034 - protein, 15 aa, synthetic construct
GPWGQPASSPRRARA

SEQ ID NO: 9035 - protein, 15 aa, synthetic construct
GRRLPRRGVAGRAQR

SEQ ID NO: 9036 - protein, 15 aa, synthetic construct
GRSRNDESFWRGWEY

SEQ ID NO: 9037 - protein, 15 aa, synthetic construct
GRTVAVGGPAAGAAP

SEQ ID NO: 9038 - protein, 15 aa, synthetic construct
GSAGGSRSPPALPRA

SEQ ID NO: 9039 - protein, 15 aa, synthetic construct
GWGEQAALSVAGLLL

SEQ ID NO: 9040 - protein, 15 aa, synthetic construct
GWSWAGRCRFPPAGR

SEQ ID NO: 9041 - protein, 15 aa, synthetic construct
IGPRAAALSTEPERP

SEQ ID NO: 9042 - protein, 15 aa, synthetic construct
LAKVQEALSLRVRPE

SEQ ID NO: 9043 - protein, 15 aa, synthetic construct
LASGFPGRSFPPAGQ

SEQ ID NO: 9044 - protein, 15 aa, synthetic construct
LAVPRGEAPAGVRHV

SEQ ID NO: 9045 - protein, 15 aa, synthetic construct
LPAAAAAAAAAAAAA

SEQ ID NO: 9046 - protein, 15 aa, synthetic construct
LRGPPHPRAASLRRP

SEQ ID NO: 9047 - protein, 15 aa, synthetic construct
NLGGARALPEPVSSG

SEQ ID NO: 9048 - protein, 15 aa, synthetic construct
NVRVLETGALAVEAL

SEQ ID NO: 9049 - protein, 15 aa, synthetic construct
PAAGLLQPLLLPEPR

SEQ ID NO: 9050 - protein, 15 aa, synthetic construct
PACTFPPGRSEMPTP

SEQ ID NO: 9051 - protein, 15 aa, synthetic construct
PADGCLDGLLSSRHQ

SEQ ID NO: 9052 - protein, 15 aa, synthetic construct
PADGHDGGALGRGGR

SEQ ID NO: 9053 - protein, 15 aa, synthetic construct
PADGPGPTGRQKSGA

SEQ ID NO: 9054 - protein, 15 aa, synthetic construct
PAEGALGRARPRRPQ

SEQ ID NO: 9055 - protein, 15 aa, synthetic construct
PAGARAALPARGDCG

SEQ ID NO: 9056 - protein, 15 aa, synthetic construct
PAGDPRLLRRLLQDA

SEQ ID NO: 9057 - protein, 15 aa, synthetic construct
PAGQRTTRCWVAAAW

SEQ ID NO: 9058 - protein, 15 aa, synthetic construct
PAVAAFHRGRDSKAA

SEQ ID NO: 9059 - protein, 15 aa, synthetic construct
PGGRRAARGRAGRRG

SEQ ID NO: 9060 - protein, 15 aa, synthetic construct
PGPAAQRPRSPRPRR

SEQ ID NO: 9061 - protein, 15 aa, synthetic construct
PGSGRFPGRSRGRRR

SEQ ID NO: 9062 - protein, 15 aa, synthetic construct
PMMTRRGPPCSSQAS

SEQ ID NO: 9063 - protein, 15 aa, synthetic construct
PSAGQGPIGFRTRRR

SEQ ID NO: 9064 - protein, 15 aa, synthetic construct
PSASSAPPSSWRPVR

SEQ ID NO: 9065 - protein, 15 aa, synthetic construct
PVIRLHPAGKWGHPG

SEQ ID NO: 9066 - protein, 15 aa, synthetic construct
PVLLHRLLLRALPHH

SEQ ID NO: 9067 - protein, 15 aa, synthetic construct
PVRVLGGGGAGRRLE

SEQ ID NO: 9068 - protein, 15 aa, synthetic construct
PVVLVGAPRGAVAPV

SEQ ID NO: 9069 - protein, 15 aa, synthetic construct
PWAAAAAAAARALLP

SEQ ID NO: 9070 - protein, 15 aa, synthetic construct
PWAASSCWSQSCQAR

SEQ ID NO: 9071 - protein, 15 aa, synthetic construct
PWASPTAGGRTASAA

SEQ ID NO: 9072 - protein, 15 aa, synthetic construct
RAAAARGGRDLWRRL

SEQ ID NO: 9073 - protein, 15 aa, synthetic construct
RAFPAAGGGDAGGPR

SEQ ID NO: 9074 - protein, 15 aa, synthetic construct
RAPGQQRVPGGAGRG

SEQ ID NO: 9075 - protein, 15 aa, synthetic construct
RARLRAAGARRRRTP

SEQ ID NO: 9076 - protein, 15 aa, synthetic construct
RLHQRPPRTGAPRHH

SEQ ID NO: 9077 - protein, 15 aa, synthetic construct
RRLPRGRTPAGPRAA

SEQ ID NO: 9078 - protein, 15 aa, synthetic construct
RRQPRAAAPARAAPG

SEQ ID NO: 9079 - protein, 15 aa, synthetic construct
RRRRLPRLLLPARRL

SEQ ID NO: 9080 - protein, 15 aa, synthetic construct
RSPRSASASCCKSAL

SEQ ID NO: 9081 - protein, 15 aa, synthetic construct
RTRTLRARRSPRMEI

SEQ ID NO: 9082 - protein, 15 aa, synthetic construct
SAASRPRPSAPGSTG

SEQ ID NO: 9083 - protein, 15 aa, synthetic construct
SACRSSSGRRVPSPS

SEQ ID NO: 9084 - protein, 15 aa, synthetic construct
SALPRARGGASPARP

SEQ ID NO: 9085 - protein, 15 aa, synthetic construct
SALQDAPPHRGARPR

SEQ ID NO: 9086 - protein, 15 aa, synthetic construct
SARAPRAAACYWCGA

SEQ ID NO: 9087 - protein, 15 aa, synthetic construct
SARARLPAALRVEAP

SEQ ID NO: 9088 - protein, 15 aa, synthetic construct
SARCAPAVVAGHGAR

SEQ ID NO: 9089 - protein, 15 aa, synthetic construct
SARKPRTEARGARMR

SEQ ID NO: 9090 - protein, 15 aa, synthetic construct
SARRGGDRGKGAPAA

SEQ ID NO: 9091 - protein, 15 aa, synthetic construct
SARSTDSSPRGWSGY

SEQ ID NO: 9092 - protein, 15 aa, synthetic construct
SELLSGPPWPPAGAL

SEQ ID NO: 9093 - protein, 15 aa, synthetic construct
SPRRSPASWPRTPSS

SEQ ID NO: 9094 - protein, 15 aa, synthetic construct
SSCRTTPSSASTRRW

SEQ ID NO: 9095 - protein, 15 aa, synthetic construct
SSLPRGPRRPRPPRS

SEQ ID NO: 9096 - protein, 15 aa, synthetic construct
SSREEGRIPRAAAAA

SEQ ID NO: 9097 - protein, 15 aa, synthetic construct
SVLWAPAGSPVSPVL

SEQ ID NO: 9098 - protein, 15 aa, synthetic construct
TGWRPVGSATRQTSR

SEQ ID NO: 9099 - protein, 15 aa, synthetic construct
TMTCYSGWVAARMGK

SEQ ID NO: 9100 - protein, 15 aa, synthetic construct
TMTTSRGSVGWTTGS

SEQ ID NO: 9101 - protein, 15 aa, synthetic construct
TPPASATRAGWGTSA

SEQ ID NO: 9102 - protein, 15 aa, synthetic construct
TRFPGRAAAVPPQQR

SEQ ID NO: 9103 - protein, 15 aa, synthetic construct
TRTRRGRPGTAQRRR

SEQ ID NO: 9104 - protein, 15 aa, synthetic construct
TRTVRSPRGLAGAGA

SEQ ID NO: 9105 - protein, 15 aa, synthetic construct
TSAPSPSSSGSVRPP

SEQ ID NO: 9106 - protein, 15 aa, synthetic construct
TSKPTRKPSKPSLAS

SEQ ID NO: 9107 - protein, 15 aa, synthetic construct
TVTRCWESSAVAALL

SEQ ID NO: 9108 - protein, 15 aa, synthetic construct
TWRRPRPAPPSPSAA

SEQ ID NO: 9109 - protein, 15 aa, synthetic construct
VALAVEVLAPAAVCP

SEQ ID NO: 9110 - protein, 15 aa, synthetic construct
VVRDSPRTLRHGRVL

SEQ ID NO: 9111 - protein, 15 aa, synthetic construct
WAPAGPKLGACGPSP

SEQ ID NO: 9112 - protein, 15 aa, synthetic construct
WAWSCGPRRASWPAA

SEQ ID NO: 9113 - protein, 15 aa, synthetic construct
WEAAGGGLGPLALPV

SEQ ID NO: 9114 - protein, 15 aa, synthetic construct
WEHSHCGVHSHRNLS

SEQ ID NO: 9115 - protein, 15 aa, synthetic construct
WEPAGPPRRWTPRPP

SEQ ID NO: 9116 - protein, 15 aa, synthetic construct
WGPLQPVHTECAFPG

SEQ ID NO: 9117 - protein, 15 aa, synthetic construct
WLPAGGSVRLRPRWS

SEQ ID NO: 9118 - protein, 15 aa, synthetic construct
WLPAGGSWAPKPRSP

SEQ ID NO: 9119 - protein, 15 aa, synthetic construct
WPAAGRPARATRGCC

SEQ ID NO: 9120 - protein, 15 aa, synthetic construct
WPWGAPLPSAGTGPP

SEQ ID NO: 9121 - protein, 15 aa, synthetic construct
WRCCGMCRCRTRGTA

SEQ ID NO: 9122 - protein, 15 aa, synthetic construct
WRRNPMAVAWGWASL

SEQ ID NO: 9123 - protein, 15 aa, synthetic construct
WTGAQWSCGWLTTSS

SEQ ID NO: 9124 - protein, 15 aa, synthetic construct
AAAAAAGGALGRPHC

SEQ ID NO: 9125 - protein, 15 aa, synthetic construct
AAPCVRRARETQIRL

SEQ ID NO: 9126 - protein, 15 aa, synthetic construct
AAQLHPYPALSFLRS

SEQ ID NO: 9127 - protein, 15 aa, synthetic construct
AASSWKAAAASAPAA

SEQ ID NO: 9128 - protein, 15 aa, synthetic construct
ACSAGSGRVVAPPAP

SEQ ID NO: 9129 - protein, 15 aa, synthetic construct
ACSWGCLKTEAASCW

SEQ ID NO: 9130 - protein, 15 aa, synthetic construct
APAAAAPTPAPSPGA

SEQ ID NO: 9131 - protein, 15 aa, synthetic construct
APAAAMPCPGASLAS

SEQ ID NO: 9132 - protein, 15 aa, synthetic construct
APAAEAAAEGSGLGR

SEQ ID NO: 9133 - protein, 15 aa, synthetic construct
APAARGAHQQHALFP

SEQ ID NO: 9134 - protein, 15 aa, synthetic construct
APAGAAPAGGLGGGA

SEQ ID NO: 9135 - protein, 15 aa, synthetic construct
APAHPAPLLLSLRGG

SEQ ID NO: 9136 - protein, 15 aa, synthetic construct
APAHPIQASEGGGQQ

SEQ ID NO: 9137 - protein, 15 aa, synthetic construct
APAPPAAAATAAAAS

SEQ ID NO: 9138 - protein, 15 aa, synthetic construct
APAQLHGAWSRRRRP

SEQ ID NO: 9139 - protein, 15 aa, synthetic construct
APASPAPPPGRPPHL

SEQ ID NO: 9140 - protein, 15 aa, synthetic construct
APASRPPSGLRRLHL

SEQ ID NO: 9141 - protein, 15 aa, synthetic construct
APAVGDVAPDVMCLS

SEQ ID NO: 9142 - protein, 15 aa, synthetic construct
APAWTGRSRRPLRAS

SEQ ID NO: 9143 - protein, 15 aa, synthetic construct
APFRDPARAFALGLP

SEQ ID NO: 9144 - protein, 15 aa, synthetic construct
APGKAAPAPYRRGAA

SEQ ID NO: 9145 - protein, 15 aa, synthetic construct
APGPRRHQVRGAQEE

SEQ ID NO: 9146 - protein, 15 aa, synthetic construct
APGRPRRHARLAEGH

SEQ ID NO: 9147 - protein, 15 aa, synthetic construct
APGRRPPVPSDRRDH

SEQ ID NO: 9148 - protein, 15 aa, synthetic construct
APKLSSASGAGDQCF

SEQ ID NO: 9149 - protein, 15 aa, synthetic construct
APLAGCRAPAELLPA

SEQ ID NO: 9150 - protein, 15 aa, synthetic construct
APLAVNPAAAAPAAA

SEQ ID NO: 9151 - protein, 15 aa, synthetic construct
APLAVNPAAAARAAA

SEQ ID NO: 9152 - protein, 15 aa, synthetic construct
APLDGGQQHRRRRRR

SEQ ID NO: 9153 - protein, 15 aa, synthetic construct
APLDLPAGALDADSR

SEQ ID NO: 9154 - protein, 15 aa, synthetic construct
APLSLASPGIGPRPV

SEQ ID NO: 9155 - protein, 15 aa, synthetic construct
APMWPRGTSLRARRE

SEQ ID NO: 9156 - protein, 15 aa, synthetic construct
APNPAAANPAAASPA

SEQ ID NO: 9157 - protein, 15 aa, synthetic construct
APPAGRLGGDLGPGR

SEQ ID NO: 9158 - protein, 15 aa, synthetic construct
APPARAGPGRALPAG

SEQ ID NO: 9159 - protein, 15 aa, synthetic construct
APPFIFREPRAQLQR

SEQ ID NO: 9160 - protein, 15 aa, synthetic construct
APPGPGAEHRDGAPL

SEQ ID NO: 9161 - protein, 15 aa, synthetic construct
APPGRPRAAPGRVHA

SEQ ID NO: 9162 - protein, 15 aa, synthetic construct
APPHRAAQAGLPHPQ

SEQ ID NO: 9163 - protein, 15 aa, synthetic construct
APPPPSAVPGCGAAS

SEQ ID NO: 9164 - protein, 15 aa, synthetic construct
APPPRGRRGGRRRRA

SEQ ID NO: 9165 - protein, 15 aa, synthetic construct
APPQHLRGPLRGRVA

SEQ ID NO: 9166 - protein, 15 aa, synthetic construct
APPRGGSWRHRQEET

SEQ ID NO: 9167 - protein, 15 aa, synthetic construct
APPSPAPTHRGRGER

SEQ ID NO: 9168 - protein, 15 aa, synthetic construct
APPSPCRRPRSRRRE

SEQ ID NO: 9169 - protein, 15 aa, synthetic construct
APPSPSLRRRGARAL

SEQ ID NO: 9170 - protein, 15 aa, synthetic construct
APPSSASPPTSCCTS

SEQ ID NO: 9171 - protein, 15 aa, synthetic construct
APPWCRNAVPARRSV

SEQ ID NO: 9172 - protein, 15 aa, synthetic construct
APQAPAARALPGARR

SEQ ID NO: 9173 - protein, 15 aa, synthetic construct
APRAPAARPAAPCWA

SEQ ID NO: 9174 - protein, 15 aa, synthetic construct
APRARAPPPAWMCAR

SEQ ID NO: 9175 - protein, 15 aa, synthetic construct
APRGPPVDPQARADL

SEQ ID NO: 9176 - protein, 15 aa, synthetic construct
APRQHGLLDPTDRPP

SEQ ID NO: 9177 - protein, 15 aa, synthetic construct
APRRFWPGPRRRRGA

SEQ ID NO: 9178 - protein, 15 aa, synthetic construct
APSQRQLPRPHPAPP

SEQ ID NO: 9179 - protein, 15 aa, synthetic construct
APTAAVTASPGGRRG

SEQ ID NO: 9180 - protein, 15 aa, synthetic construct
APTSQLDHGASAERG

SEQ ID NO: 9181 - protein, 15 aa, synthetic construct
APTSRALERESSCLL

SEQ ID NO: 9182 - protein, 15 aa, synthetic construct
APTWRRRGRGGARAG

SEQ ID NO: 9183 - protein, 15 aa, synthetic construct
ASPTLGRRRRLAARR

SEQ ID NO: 9184 - protein, 15 aa, synthetic construct
ASPVRSSARPTPGSD

SEQ ID NO: 9185 - protein, 15 aa, synthetic construct
ATPFWELLTSEAGPS

SEQ ID NO: 9186 - protein, 15 aa, synthetic construct
CCCRPRRRPPRSRRP

SEQ ID NO: 9187 - protein, 15 aa, synthetic construct
DDFAAPASTLAGEPY

SEQ ID NO: 9188 - protein, 15 aa, synthetic construct
DERMGSAHVRAALWP

SEQ ID NO: 9189 - protein, 15 aa, synthetic construct
DPNFTSKDEERFCPH

SEQ ID NO: 9190 - protein, 15 aa, synthetic construct
GFQMPQGRLLFWVSQ

SEQ ID NO: 9191 - protein, 15 aa, synthetic construct
GGHGSRAAPSGAQNC

SEQ ID NO: 9192 - protein, 15 aa, synthetic construct
GVAESVNSAPLLGGG

SEQ ID NO: 9193 - protein, 15 aa, synthetic construct
IGRPAPLQRGGGRPR

SEQ ID NO: 9194 - protein, 15 aa, synthetic construct
KSSGLLSLRSHHSHL

SEQ ID NO: 9195 - protein, 15 aa, synthetic construct
LAPHDRGRLGAELRA

SEQ ID NO: 9196 - protein, 15 aa, synthetic construct
LCHGQPLSVHLHHLG

SEQ ID NO: 9197 - protein, 15 aa, synthetic construct
LPAAGLPRAPALCLR

SEQ ID NO: 9198 - protein, 15 aa, synthetic construct
LQPPPAVLQDLGAVV

SEQ ID NO: 9199 - protein, 15 aa, synthetic construct
LRRGRRLAPGASLAG

SEQ ID NO: 9200 - protein, 15 aa, synthetic construct
PGPGAELLQRVDSGA

SEQ ID NO: 9201 - protein, 15 aa, synthetic construct
PGPRSPPCLPPRPPL

SEQ ID NO: 9202 - protein, 15 aa, synthetic construct
PGPRTLRRPGSRSGN

SEQ ID NO: 9203 - protein, 15 aa, synthetic construct
PRGRARRRGEGGSGS

SEQ ID NO: 9204 - protein, 15 aa, synthetic construct
PRSAMPGPGPRVAGA

SEQ ID NO: 9205 - protein, 15 aa, synthetic construct
PRVLGARPAAEDHLR

SEQ ID NO: 9206 - protein, 15 aa, synthetic construct
PSGTGNQQDEALCRS

SEQ ID NO: 9207 - protein, 15 aa, synthetic construct
PSLLPPRQSITAATR

SEQ ID NO: 9208 - protein, 15 aa, synthetic construct
PSPAAAVNSLRSAAP

SEQ ID NO: 9209 - protein, 15 aa, synthetic construct
RRNGRRWREAAGRGG

SEQ ID NO: 9210 - protein, 15 aa, synthetic construct
RRRGPRGAAARDAGA

SEQ ID NO: 9211 - protein, 15 aa, synthetic construct
RRSSSSPPRRTPAPR

SEQ ID NO: 9212 - protein, 15 aa, synthetic construct
RSPLGELVPSPISGG

SEQ ID NO: 9213 - protein, 15 aa, synthetic construct
RSTRARRTAPASFRG

SEQ ID NO: 9214 - protein, 15 aa, synthetic construct
RWLSLPSGAPTTSRP

SEQ ID NO: 9215 - protein, 15 aa, synthetic construct
SRRPGPRSRRCAQPR

SEQ ID NO: 9216 - protein, 15 aa, synthetic construct
VPNRGSPFSRFIHTW

SEQ ID NO: 9217 - protein, 15 aa, synthetic construct
VPPRGQHRWLTRLSD

SEQ ID NO: 9218 - protein, 15 aa, synthetic construct
VPPWLGRGRERRRRR

SEQ ID NO: 9219 - protein, 15 aa, synthetic construct
VPVGALHSPCPHPLL

SEQ ID NO: 9220 - protein, 15 aa, synthetic construct
WRPRRTAPPTSCPWT

SEQ ID NO: 9221 - protein, 15 aa, synthetic construct
YSDPAPRQGRLGTGK

SEQ ID NO: 9222 - protein, 15 aa, synthetic construct
AAARAPRAGPGPADG

SEQ ID NO: 9223 - protein, 15 aa, synthetic construct
AAIPLGTSVASWSRP

SEQ ID NO: 9224 - protein, 15 aa, synthetic construct
AAPPPAGRAVRRAAL

SEQ ID NO: 9225 - protein, 15 aa, synthetic construct
AAPPPLRPQRDLGHR

SEQ ID NO: 9226 - protein, 15 aa, synthetic construct
AIVPRPPAAAALRGH

SEQ ID NO: 9227 - protein, 15 aa, synthetic construct
DLQLRARSGAATGAG

SEQ ID NO: 9228 - protein, 15 aa, synthetic construct
GCEGRARLLPEGGER

SEQ ID NO: 9229 - protein, 15 aa, synthetic construct
GGGGGGGGGGGGGPR

SEQ ID NO: 9230 - protein, 15 aa, synthetic construct
GGGGRGGGGGGGGGS

SEQ ID NO: 9231 - protein, 15 aa, synthetic construct
GGGGWGRGGGGAAAG

SEQ ID NO: 9232 - protein, 15 aa, synthetic construct
GRGRPGTGRPRAERH

SEQ ID NO: 9233 - protein, 15 aa, synthetic construct
GSERQRVRPGGGGGA

SEQ ID NO: 9234 - protein, 15 aa, synthetic construct
GTPAARRRTRVHAAA

SEQ ID NO: 9235 - protein, 15 aa, synthetic construct
IHHRLPGQQRGHLDV

SEQ ID NO: 9236 - protein, 15 aa, synthetic construct
LRPEPPAPQPVPLRV

SEQ ID NO: 9237 - protein, 15 aa, synthetic construct
PALELRRPPLQTLPI

SEQ ID NO: 9238 - protein, 15 aa, synthetic construct
PDPGPLHHPGTPAGL

SEQ ID NO: 9239 - protein, 15 aa, synthetic construct
PNRPFGALLGVVGLS

SEQ ID NO: 9240 - protein, 15 aa, synthetic construct
PPETKKSQTKEAELP

SEQ ID NO: 9241 - protein, 15 aa, synthetic construct
PPSAPSPSAAAAAAA

SEQ ID NO: 9242 - protein, 15 aa, synthetic construct
PSALCPLCLPKSSQD

SEQ ID NO: 9243 - protein, 15 aa, synthetic construct
PSALLVLGTPGLPWV

SEQ ID NO: 9244 - protein, 15 aa, synthetic construct
PSRPRAPSWLPPPAP

SEQ ID NO: 9245 - protein, 15 aa, synthetic construct
RLAPASWSWRSSCGQ

SEQ ID NO: 9246 - protein, 15 aa, synthetic construct
RPPEGRAGGVRGGAA

SEQ ID NO: 9247 - protein, 15 aa, synthetic construct
SRKSGPSQRNRAFAR

SEQ ID NO: 9248 - protein, 15 aa, synthetic construct
TQRLLPQDPARGRPP

SEQ ID NO: 9249 - protein, 15 aa, synthetic construct
VFVKIPVDSCPLGYG

SEQ ID NO: 9250 - protein, 15 aa, synthetic construct
WPRAPGGAARCSRCC

SEQ ID NO: 9251 - protein, 15 aa, synthetic construct
WQMIWTSRQEMQGPQ

SEQ ID NO: 9252 - protein, 15 aa, synthetic construct
AAAAAAAAAAAAAAA

SEQ ID NO: 9253 - protein, 15 aa, synthetic construct
AAAAAAGAAAAGAGA

SEQ ID NO: 9254 - protein, 15 aa, synthetic construct
AAAGRAAGLAAAAAP

SEQ ID NO: 9255 - protein, 15 aa, synthetic construct
AAARRGARVAAAAAA

SEQ ID NO: 9256 - protein, 15 aa, synthetic construct
AAGAARQAAPRVPRF

SEQ ID NO: 9257 - protein, 15 aa, synthetic construct
AAGVAAAAAAGAAQG

SEQ ID NO: 9258 - protein, 15 aa, synthetic construct
AAPFTAAAAAAAAAA

SEQ ID NO: 9259 - protein, 15 aa, synthetic construct
AGAGLAAGAVGRAPA

SEQ ID NO: 9260 - protein, 15 aa, synthetic construct
AGAHLGAAAAAAAAA

SEQ ID NO: 9261 - protein, 15 aa, synthetic construct
AGAVVAAGAAAAVAA

SEQ ID NO: 9262 - protein, 15 aa, synthetic construct
AGRAAAAAAGAAAAA

SEQ ID NO: 9263 - protein, 15 aa, synthetic construct
ALGAAAAVALGAAAA

SEQ ID NO: 9264 - protein, 15 aa, synthetic construct
APAAGGAAAAAAAAS

SEQ ID NO: 9265 - protein, 15 aa, synthetic construct
APGGGLPPGAGAARG

SEQ ID NO: 9266 - protein, 15 aa, synthetic construct
AREMFSSRHQREATA

SEQ ID NO: 9267 - protein, 15 aa, synthetic construct
ARGAAAAAPGGSDAA

SEQ ID NO: 9268 - protein, 15 aa, synthetic construct
ARGPAAAAGRRAGGA

SEQ ID NO: 9269 - protein, 15 aa, synthetic construct
ARNPATAPGPPSSAV

SEQ ID NO: 9270 - protein, 15 aa, synthetic construct
ARPGPARGSAAAAAA

SEQ ID NO: 9271 - protein, 15 aa, synthetic construct
AVAMAMAPAPSVAMA

SEQ ID NO: 9272 - protein, 15 aa, synthetic construct
AVAMAPAVAVASADW

SEQ ID NO: 9273 - protein, 15 aa, synthetic construct
CAAAAAAAPSTAARS

SEQ ID NO: 9274 - protein, 15 aa, synthetic construct
CGARGGLGVSGDPGV

SEQ ID NO: 9275 - protein, 15 aa, synthetic construct
CLGTAAAAGQRAGAG

SEQ ID NO: 9276 - protein, 15 aa, synthetic construct
CVAATTETTMAPLAM

SEQ ID NO: 9277 - protein, 15 aa, synthetic construct
DGAVRAGVAGAARAA

SEQ ID NO: 9278 - protein, 15 aa, synthetic construct
DGGGGTGVRGGAGSR

SEQ ID NO: 9279 - protein, 15 aa, synthetic construct
DGQVPDDLPVPAVQP

SEQ ID NO: 9280 - protein, 15 aa, synthetic construct
DKEMLPGGSKTWPPQ

SEQ ID NO: 9281 - protein, 15 aa, synthetic construct
DLNNQHHVWQLLQKL

SEQ ID NO: 9282 - protein, 15 aa, synthetic construct
DNFSAHHFFHSNSGY

SEQ ID NO: 9283 - protein, 15 aa, synthetic construct
DNFSAHHIFHSSSGY

SEQ ID NO: 9284 - protein, 15 aa, synthetic construct
DNFSTHHFFQSGSGY

SEQ ID NO: 9285 - protein, 15 aa, synthetic construct
DNFYTHHFFQCGSGS

SEQ ID NO: 9286 - protein, 15 aa, synthetic construct
DSLLLLWKLLPRIPY

SEQ ID NO: 9287 - protein, 15 aa, synthetic construct
DVFSAHHFINSGSVC

SEQ ID NO: 9288 - protein, 15 aa, synthetic construct
EQAATSLPLRVAPRS

SEQ ID NO: 9289 - protein, 15 aa, synthetic construct
FALSTSERTAGQSTL

SEQ ID NO: 9290 - protein, 15 aa, synthetic construct
GAGRPGRGADGAARA

SEQ ID NO: 9291 - protein, 15 aa, synthetic construct
GARTDRGRAAAAAAG

SEQ ID NO: 9292 - protein, 15 aa, synthetic construct
GCFETAPGRGAAGRG

SEQ ID NO: 9293 - protein, 15 aa, synthetic construct
GEARPRREVEPHPDP

SEQ ID NO: 9294 - protein, 15 aa, synthetic construct
GGAGRAAGDGRERLG

SEQ ID NO: 9295 - protein, 15 aa, synthetic construct
GGAGRRGAAAALGRG

SEQ ID NO: 9296 - protein, 15 aa, synthetic construct
GGDRHLGAAAGAGAA

SEQ ID NO: 9297 - protein, 15 aa, synthetic construct
GGGCASAGAGAAGTA

SEQ ID NO: 9298 - protein, 15 aa, synthetic construct
GGGQAAAAAAGHAAG

SEQ ID NO: 9299 - protein, 15 aa, synthetic construct
GGHQGAATVVPAAVR

SEQ ID NO: 9300 - protein, 15 aa, synthetic construct
GGPGAAAAAGAAGRA

SEQ ID NO: 9301 - protein, 15 aa, synthetic construct
GGSAAAASLTLCNAA

SEQ ID NO: 9302 - protein, 15 aa, synthetic construct
GGSAARAAVAAAAAA

SEQ ID NO: 9303 - protein, 15 aa, synthetic construct
GKSRHPSREGQGRQG

SEQ ID NO: 9304 - protein, 15 aa, synthetic construct
GLGAAAGAAPGSHGR

SEQ ID NO: 9305 - protein, 15 aa, synthetic construct
GLWLWLLLWLWLQRP

SEQ ID NO: 9306 - protein, 15 aa, synthetic construct
GLWLWLWLWLCLPLL

SEQ ID NO: 9307 - protein, 15 aa, synthetic construct
GPPGAVRVSFSTGAR

SEQ ID NO: 9308 - protein, 15 aa, synthetic construct
GRAGGSAGRAAAAGR

SEQ ID NO: 9309 - protein, 15 aa, synthetic construct
GRAGRGVGAGAALPQ

SEQ ID NO: 9310 - protein, 15 aa, synthetic construct
GRFPGTGGASGGAGR

SEQ ID NO: 9311 - protein, 15 aa, synthetic construct
GRGDGGAEGSAGAGG

SEQ ID NO: 9312 - protein, 15 aa, synthetic construct
GRGGRLGTAEPGAGA

SEQ ID NO: 9313 - protein, 15 aa, synthetic construct
GSAEAGGRAAAAAAA

SEQ ID NO: 9314 - protein, 15 aa, synthetic construct
GSGGVGAAVVAAGQR

SEQ ID NO: 9315 - protein, 15 aa, synthetic construct
GSHRAPVAPAAAAFH

SEQ ID NO: 9316 - protein, 15 aa, synthetic construct
GSPPAARRPMWSPAP

SEQ ID NO: 9317 - protein, 15 aa, synthetic construct
GSVAMEAWAMAMEAW

SEQ ID NO: 9318 - protein, 15 aa, synthetic construct
GTFIYRPHSVVPLAG

SEQ ID NO: 9319 - protein, 15 aa, synthetic construct
GVAGGGRAAAGAAAA

SEQ ID NO: 9320 - protein, 15 aa, synthetic construct
GVPGLAGAGAASGCA

SEQ ID NO: 9321 - protein, 15 aa, synthetic construct
GVRAGKIAAAGTSLP

SEQ ID NO: 9322 - protein, 15 aa, synthetic construct
GWMEKDASLGTAAAA

SEQ ID NO: 9323 - protein, 15 aa, synthetic construct
HQPHARRRERGRAHQ

SEQ ID NO: 9324 - protein, 15 aa, synthetic construct
ICSWKCCQWLHSPSK

SEQ ID NO: 9325 - protein, 15 aa, synthetic construct
KLPGASGPLVFPDPA

SEQ ID NO: 9326 - protein, 15 aa, synthetic construct
LAAHEGDGSVPAEAA

SEQ ID NO: 9327 - protein, 15 aa, synthetic construct
LCCASGLSPELWLWM

SEQ ID NO: 9328 - protein, 15 aa, synthetic construct
LGAAAAAAAATPGEA

SEQ ID NO: 9329 - protein, 15 aa, synthetic construct
LGAAGAVLALRAGAV

SEQ ID NO: 9330 - protein, 15 aa, synthetic construct
LGGRGAAAAGGRAAL

SEQ ID NO: 9331 - protein, 15 aa, synthetic construct
LPGLAAAGGAAGARA

SEQ ID NO: 9332 - protein, 15 aa, synthetic construct
LRAASGAGGRPVHQL

SEQ ID NO: 9333 - protein, 15 aa, synthetic construct
LWDQLPWDLQSHPLE

SEQ ID NO: 9334 - protein, 15 aa, synthetic construct
LWLWLLLWLWLPQTG

SEQ ID NO: 9335 - protein, 15 aa, synthetic construct
LWLWLWLPLPLWLWL

SEQ ID NO: 9336 - protein, 15 aa, synthetic construct
LWLWRLWLWVLWLRR

SEQ ID NO: 9337 - protein, 15 aa, synthetic construct
PAAGAAGRAGVRAAQ

SEQ ID NO: 9338 - protein, 15 aa, synthetic construct
PALVDAAGAPAAGAA

SEQ ID NO: 9339 - protein, 15 aa, synthetic construct
PDGGDGSPSVPRPHQ

SEQ ID NO: 9340 - protein, 15 aa, synthetic construct
PGAAALAARGAQGGL

SEQ ID NO: 9341 - protein, 15 aa, synthetic construct
PGLAAGAAAAAGALR

SEQ ID NO: 9342 - protein, 15 aa, synthetic construct
PGLWLWRPGLWLWRP

SEQ ID NO: 9343 - protein, 15 aa, synthetic construct
PHGGHADGRVRDVHA

SEQ ID NO: 9344 - protein, 15 aa, synthetic construct
PPLAAAPTASATRWT

SEQ ID NO: 9345 - protein, 15 aa, synthetic construct
PPTAAAAAAAAGHRV

SEQ ID NO: 9346 - protein, 15 aa, synthetic construct
PRGRTGAAAAAAAAV

SEQ ID NO: 9347 - protein, 15 aa, synthetic construct
PWGWCGGHGRGTREP

SEQ ID NO: 9348 - protein, 15 aa, synthetic construct
QGGRLAGAGAGGVGR

SEQ ID NO: 9349 - protein, 15 aa, synthetic construct
QLRGPVHRPLQALPA

SEQ ID NO: 9350 - protein, 15 aa, synthetic construct
QPGPGRGGAAGVGAA

SEQ ID NO: 9351 - protein, 15 aa, synthetic construct
QRHAGAPLLHSSACW

SEQ ID NO: 9352 - protein, 15 aa, synthetic construct
QWWPWLWVLWLRRPG

SEQ ID NO: 9353 - protein, 15 aa, synthetic construct
RAAAAAALGLDGAGL

SEQ ID NO: 9354 - protein, 15 aa, synthetic construct
RAAAFAAPAGAGPAV

SEQ ID NO: 9355 - protein, 15 aa, synthetic construct
RAAAVAAGEAAAVGS

SEQ ID NO: 9356 - protein, 15 aa, synthetic construct
RAAGARGGAGAAEPD

SEQ ID NO: 9357 - protein, 15 aa, synthetic construct
RAGLGAAGAAWGRGR

SEQ ID NO: 9358 - protein, 15 aa, synthetic construct
RAGRGGAAAAAGRGA

SEQ ID NO: 9359 - protein, 15 aa, synthetic construct
RGAAAAAAAAARAAA

SEQ ID NO: 9360 - protein, 15 aa, synthetic construct
RGAAGAVAAAASGRP

SEQ ID NO: 9361 - protein, 15 aa, synthetic construct
RGAASRAGRGAPAGA

SEQ ID NO: 9362 - protein, 15 aa, synthetic construct
RGGAASGTGGAWKPG

SEQ ID NO: 9363 - protein, 15 aa, synthetic construct
RGPTPSPRPASEEVS

SEQ ID NO: 9364 - protein, 15 aa, synthetic construct
RGPVAPVGGPRGAVA

SEQ ID NO: 9365 - protein, 15 aa, synthetic construct
RHQPHAQRRAWSSRE

SEQ ID NO: 9366 - protein, 15 aa, synthetic construct
RLWRGRGAGAAAPGL

SEQ ID NO: 9367 - protein, 15 aa, synthetic construct
RPGAGAMAAAAAGAS

SEQ ID NO: 9368 - protein, 15 aa, synthetic construct
RPPQSRPGRAAARAA

SEQ ID NO: 9369 - protein, 15 aa, synthetic construct
RQRPAGRQGGAAAAA

SEQ ID NO: 9370 - protein, 15 aa, synthetic construct
RRGAAAAAGKGAAGR

SEQ ID NO: 9371 - protein, 15 aa, synthetic construct
RRGAGTAAVAAGTAP

SEQ ID NO: 9372 - protein, 15 aa, synthetic construct
RRPGFLRHPAPPPAR

SEQ ID NO: 9373 - protein, 15 aa, synthetic construct
RRPRAPGAGAGAGTR

SEQ ID NO: 9374 - protein, 15 aa, synthetic construct
RRQQQRWLLWWRLRP

SEQ ID NO: 9375 - protein, 15 aa, synthetic construct
RRRRRRRWPAHRLAQ

SEQ ID NO: 9376 - protein, 15 aa, synthetic construct
RSSASFTGTGEAAAA

SEQ ID NO: 9377 - protein, 15 aa, synthetic construct
RTARAAVGRGAAAGG

SEQ ID NO: 9378 - protein, 15 aa, synthetic construct
RTLAAAAAAAAAAGA

SEQ ID NO: 9379 - protein, 15 aa, synthetic construct
SSPAAAAGAAAAAAA

SEQ ID NO: 9380 - protein, 15 aa, synthetic construct
TAAATIAVTVAAASV

SEQ ID NO: 9381 - protein, 15 aa, synthetic construct
TPDALGRAAGAAAAA

SEQ ID NO: 9382 - protein, 15 aa, synthetic construct
VGPRTAGAAAGGRRG

SEQ ID NO: 9383 - protein, 15 aa, synthetic construct
VLWIRRPRLWLWKPA

SEQ ID NO: 9384 - protein, 15 aa, synthetic construct
VLWLWRPGLWLWRPG

SEQ ID NO: 9385 - protein, 15 aa, synthetic construct
VPAGEAQWVPHAGRL

SEQ ID NO: 9386 - protein, 15 aa, synthetic construct
VRAAAAAAAAAAATA

SEQ ID NO: 9387 - protein, 15 aa, synthetic construct
VRQLLRKLLRRPWLW

SEQ ID NO: 9388 - protein, 15 aa, synthetic construct
VWQLLRKLLWHPWLW

SEQ ID NO: 9389 - protein, 15 aa, synthetic construct
WGAARGTASPAAPRS

SEQ ID NO: 9390 - protein, 15 aa, synthetic construct
WHLHLPPAFSCSSCG

SEQ ID NO: 9391 - protein, 15 aa, synthetic construct
WKRRRRRRLPGRRGA

SEQ ID NO: 9392 - protein, 15 aa, synthetic construct
WNIMGLLQMLIKSTR

SEQ ID NO: 9393 - protein, 15 aa, synthetic construct
WPRAGGGGGAAAPGS

SEQ ID NO: 9394 - protein, 15 aa, synthetic construct
WPRGRRRGRQRRCWR

SEQ ID NO: 9395 - protein, 15 aa, synthetic construct
WRLDAVGSCSSTGSA

SEQ ID NO: 9396 - protein, 15 aa, synthetic construct
WRPSGRCNSGAGSSA

SEQ ID NO: 9397 - protein, 15 aa, synthetic construct
WSGTGRGAAPTEGGL

SEQ ID NO: 9398 - protein, 15 aa, synthetic construct
WSPAGTTGAGAAAAG

SEQ ID NO: 9399 - protein, 15 aa, synthetic construct
WTPPGTASGAAAPRR

SEQ ID NO: 9400 - protein, 15 aa, synthetic construct
AALQGGRGRGGPTPG

SEQ ID NO: 9401 - protein, 15 aa, synthetic construct
AAPREALSGIQRGPL

SEQ ID NO: 9402 - protein, 15 aa, synthetic construct
AARALAAGQSFWPSG

SEQ ID NO: 9403 - protein, 15 aa, synthetic construct
AARGVLRAAVQRQEP

SEQ ID NO: 9404 - protein, 15 aa, synthetic construct
AARRAVPGADAQRCP

SEQ ID NO: 9405 - protein, 15 aa, synthetic construct
AARRGAAQDPGADGR

SEQ ID NO: 9406 - protein, 15 aa, synthetic construct
AARVHLPPRPRALPH

SEQ ID NO: 9407 - protein, 15 aa, synthetic construct
AAVHAAVQPPDREAQ

SEQ ID NO: 9408 - protein, 15 aa, synthetic construct
AFRHLHSPGGTAVPA

SEQ ID NO: 9409 - protein, 15 aa, synthetic construct
AGRPGLQHPPLEGAQ

SEQ ID NO: 9410 - protein, 15 aa, synthetic construct
APAPGLQQHHPDVQR

SEQ ID NO: 9411 - protein, 15 aa, synthetic construct
APGRLGGGGCGDAPA

SEQ ID NO: 9412 - protein, 15 aa, synthetic construct
ASSKDPKELSALGPK

SEQ ID NO: 9413 - protein, 15 aa, synthetic construct
AVCVNTAAASAAGHP

SEQ ID NO: 9414 - protein, 15 aa, synthetic construct
AWRAYRWPRRAAATR

SEQ ID NO: 9415 - protein, 15 aa, synthetic construct
AWRPSTSPPSLSPAV

SEQ ID NO: 9416 - protein, 15 aa, synthetic construct
CAPGRSDPGWECGAG

SEQ ID NO: 9417 - protein, 15 aa, synthetic construct
CCKVSCQSVSSSLLQ

SEQ ID NO: 9418 - protein, 15 aa, synthetic construct
CDWRGGRSQSSARHL

SEQ ID NO: 9419 - protein, 15 aa, synthetic construct
CGARVHPFLALASGW

SEQ ID NO: 9420 - protein, 15 aa, synthetic construct
CLDEGSREEKHAPSL

SEQ ID NO: 9421 - protein, 15 aa, synthetic construct
CLFSSCATFPWYQRL

SEQ ID NO: 9422 - protein, 15 aa, synthetic construct
CPSWNVLIIPLRNDW

SEQ ID NO: 9423 - protein, 15 aa, synthetic construct
CRAPPGTRAGDCQAG

SEQ ID NO: 9424 - protein, 15 aa, synthetic construct
CRPLPIPPRWTVCGA

SEQ ID NO: 9425 - protein, 15 aa, synthetic construct
CSLCQHGRSLSSWAS

SEQ ID NO: 9426 - protein, 15 aa, synthetic construct
CWKPCQDSGLSHTEW

SEQ ID NO: 9427 - protein, 15 aa, synthetic construct
EDAERKCSPYVWSTI

SEQ ID NO: 9428 - protein, 15 aa, synthetic construct
EDEAAAGHRLAGLRR

SEQ ID NO: 9429 - protein, 15 aa, synthetic construct
EDSDDDDGGGDAGAD

SEQ ID NO: 9430 - protein, 15 aa, synthetic construct
EDSEKADWLQQADAS

SEQ ID NO: 9431 - protein, 15 aa, synthetic construct
EDSPQVEVHEFAQPQ

SEQ ID NO: 9432 - protein, 15 aa, synthetic construct
EDVLLRCSRKASFPF

SEQ ID NO: 9433 - protein, 15 aa, synthetic construct
EEAAGGTRPPGPETD

SEQ ID NO: 9434 - protein, 15 aa, synthetic construct
FGNDPPPPPPPNRQS

SEQ ID NO: 9435 - protein, 15 aa, synthetic construct
GAAVAARPAPRRRWA

SEQ ID NO: 9436 - protein, 15 aa, synthetic construct
GAAVLAGRGLRAGPQ

SEQ ID NO: 9437 - protein, 15 aa, synthetic construct
GAAVRAQPGSAPHRG

SEQ ID NO: 9438 - protein, 15 aa, synthetic construct
GACGRRGGSSPRVRL

SEQ ID NO: 9439 - protein, 15 aa, synthetic construct
GARAQRLGGRPRGGR

SEQ ID NO: 9440 - protein, 15 aa, synthetic construct
GARASAARGAAAAAT

SEQ ID NO: 9441 - protein, 15 aa, synthetic construct
GARAVARAAQQRRGR

SEQ ID NO: 9442 - protein, 15 aa, synthetic construct
GARPALRHRIPVPRL

SEQ ID NO: 9443 - protein, 15 aa, synthetic construct
GARPGARRRPPLRRR

SEQ ID NO: 9444 - protein, 15 aa, synthetic construct
GARVEGLGTSSADCG

SEQ ID NO: 9445 - protein, 15 aa, synthetic construct
GDGGRGPAGLGGGGG

SEQ ID NO: 9446 - protein, 15 aa, synthetic construct
GDRPGLSARCAAPSA

SEQ ID NO: 9447 - protein, 15 aa, synthetic construct
GEEEPPPPPPAAAAL

SEQ ID NO: 9448 - protein, 15 aa, synthetic construct
GEVRADPSGGERCLR

SEQ ID NO: 9449 - protein, 15 aa, synthetic construct
GFALLALVGLVGVAS

SEQ ID NO: 9450 - protein, 15 aa, synthetic construct
GFRSLGECPLVGPAA

SEQ ID NO: 9451 - protein, 15 aa, synthetic construct
GGQRPLQRFQPRLPG

SEQ ID NO: 9452 - protein, 15 aa, synthetic construct
GGRGLWLRAAAAAAE

SEQ ID NO: 9453 - protein, 15 aa, synthetic construct
GGSRATGFGPAHEFE

SEQ ID NO: 9454 - protein, 15 aa, synthetic construct
GLLGPQALRRRTTRS

SEQ ID NO: 9455 - protein, 15 aa, synthetic construct
GPHAAGAARLGTERH

SEQ ID NO: 9456 - protein, 15 aa, synthetic construct
GRRGLARVSHHHIKL

SEQ ID NO: 9457 - protein, 15 aa, synthetic construct
GWRSLGPPGLLLGVP

SEQ ID NO: 9458 - protein, 15 aa, synthetic construct
HLDLGLESQTWSKGL

SEQ ID NO: 9459 - protein, 15 aa, synthetic construct
HLQDLLLLSHHLLPA

SEQ ID NO: 9460 - protein, 15 aa, synthetic construct
LGPGRAARNLRAASR

SEQ ID NO: 9461 - protein, 15 aa, synthetic construct
LGPGRRRGRPAGRGA

SEQ ID NO: 9462 - protein, 15 aa, synthetic construct
LLPPHCRGNDPHCLL

SEQ ID NO: 9463 - protein, 15 aa, synthetic construct
LPPLPRDRARGPREY

SEQ ID NO: 9464 - protein, 15 aa, synthetic construct
LRTAQQESPKVRSHS

SEQ ID NO: 9465 - protein, 15 aa, synthetic construct
PPAWAALARGVQRCP

SEQ ID NO: 9466 - protein, 15 aa, synthetic construct
PPGWTECGLPLGGRG

SEQ ID NO: 9467 - protein, 15 aa, synthetic construct
PPPPYGLGPPPPCLS

SEQ ID NO: 9468 - protein, 15 aa, synthetic construct
PRAAARRHPWGIGGG

SEQ ID NO: 9469 - protein, 15 aa, synthetic construct
PRTSSGEPTALTSTS

SEQ ID NO: 9470 - protein, 15 aa, synthetic construct
PSPWRKTRKGTMSLT

SEQ ID NO: 9471 - protein, 15 aa, synthetic construct
PTTRAGARPRVGTSS

SEQ ID NO: 9472 - protein, 15 aa, synthetic construct
PWRSSVGSPRPRPPT

SEQ ID NO: 9473 - protein, 15 aa, synthetic construct
PYRLLRDRPHHRQGQ

SEQ ID NO: 9474 - protein, 15 aa, synthetic construct
PYRQPPRHPRAPKPS

SEQ ID NO: 9475 - protein, 15 aa, synthetic construct
QAAPGLGRRQLGGAG

SEQ ID NO: 9476 - protein, 15 aa, synthetic construct
QGPNRTRTVRAVGVR

SEQ ID NO: 9477 - protein, 15 aa, synthetic construct
RAPGAPPRHAVDPSG

SEQ ID NO: 9478 - protein, 15 aa, synthetic construct
RASALRPSRRRPTAA

SEQ ID NO: 9479 - protein, 15 aa, synthetic construct
RASLLRPSVPDGLFP

SEQ ID NO: 9480 - protein, 15 aa, synthetic construct
RAWGWTAGAGAGPRL

SEQ ID NO: 9481 - protein, 15 aa, synthetic construct
RGPGRAAVTAAAAAP

SEQ ID NO: 9482 - protein, 15 aa, synthetic construct
RLLLHGSRFSGAPGR

SEQ ID NO: 9483 - protein, 15 aa, synthetic construct
RPAWAKSTSAASSCS

SEQ ID NO: 9484 - protein, 15 aa, synthetic construct
RRDAGPPSWTHRTPR

SEQ ID NO: 9485 - protein, 15 aa, synthetic construct
RSTGCCSGSPAAARP

SEQ ID NO: 9486 - protein, 15 aa, synthetic construct
SPAPGPPRRARSVPR

SEQ ID NO: 9487 - protein, 15 aa, synthetic construct
TPAGPDRGAWRRGFP

SEQ ID NO: 9488 - protein, 15 aa, synthetic construct
TSLPHLHHCSPGKQH

SEQ ID NO: 9489 - protein, 15 aa, synthetic construct
VGPLSATCPPGHRRV

SEQ ID NO: 9490 - protein, 15 aa, synthetic construct
VVQLLLLLHLQDNSN

SEQ ID NO: 9491 - protein, 15 aa, synthetic construct
WCSSDRERLAPRRRR

SEQ ID NO: 9492 - protein, 15 aa, synthetic construct
WCVRAPWGLISPRPA

SEQ ID NO: 9493 - protein, 15 aa, synthetic construct
WHSQGTPWATWMTAG

SEQ ID NO: 9494 - protein, 15 aa, synthetic construct
WLQQHLRVPLQGQWW

SEQ ID NO: 9495 - protein, 15 aa, synthetic construct
WLRAAGAGGAGRRGL

SEQ ID NO: 9496 - protein, 15 aa, synthetic construct
WLWWRREWIWFRWWS

SEQ ID NO: 9497 - protein, 15 aa, synthetic construct
WPAVRPASVDFPAAP

SEQ ID NO: 9498 - protein, 15 aa, synthetic construct
WPPCHQPGRLEEQRA

SEQ ID NO: 9499 - protein, 15 aa, synthetic construct
WPSCPVPQRSAPPTR

SEQ ID NO: 9500 - protein, 15 aa, synthetic construct
WRPGLIRQLLLPQPP

SEQ ID NO: 9501 - protein, 15 aa, synthetic construct
WRPGLSADAGLCVQL

SEQ ID NO: 9502 - protein, 15 aa, synthetic construct
WRPGLSGVPWKVGFR

SEQ ID NO: 9503 - protein, 15 aa, synthetic construct
WRSTSGSEWWGEVPS

SEQ ID NO: 9504 - protein, 15 aa, synthetic construct
WSGWARRSGDACGCC

SEQ ID NO: 9505 - protein, 15 aa, synthetic construct
AAGPALSGPSGSELS

SEQ ID NO: 9506 - protein, 15 aa, synthetic construct
ASTRLSACLISIKEN

SEQ ID NO: 9507 - protein, 15 aa, synthetic construct
CPRGKCRLRRREQTC

SEQ ID NO: 9508 - protein, 15 aa, synthetic construct
GCAVLHTLVAGGCGD

SEQ ID NO: 9509 - protein, 15 aa, synthetic construct
GDGRPAEGEHAASPL

SEQ ID NO: 9510 - protein, 15 aa, synthetic construct
GGRDVDFEIVLPAVP

SEQ ID NO: 9511 - protein, 15 aa, synthetic construct
GLTAEVRRAGGTGHR

SEQ ID NO: 9512 - protein, 15 aa, synthetic construct
GRVCGRPARLLGQPQ

SEQ ID NO: 9513 - protein, 15 aa, synthetic construct
PGPHLGLRHHAPPQP

SEQ ID NO: 9514 - protein, 15 aa, synthetic construct
PGPPRLPPNLWSPGL

SEQ ID NO: 9515 - protein, 15 aa, synthetic construct
PPAGVHVEAGAQQLE

SEQ ID NO: 9516 - protein, 15 aa, synthetic construct
PRGAVRAERGVQHPP

SEQ ID NO: 9517 - protein, 15 aa, synthetic construct
PSSASCIPITTCPRR

SEQ ID NO: 9518 - protein, 15 aa, synthetic construct
QLCPLGSARLGGAAK

SEQ ID NO: 9519 - protein, 15 aa, synthetic construct
RGAGGGAPGAGGHGR

SEQ ID NO: 9520 - protein, 15 aa, synthetic construct
WCSSCARCGPRPARS

SEQ ID NO: 9521 - protein, 15 aa, synthetic construct
WRRPPPGRRLRSVFH

SEQ ID NO: 9522 - protein, 15 aa, synthetic construct
AAAAAAVPAPAAAAA

SEQ ID NO: 9523 - protein, 15 aa, synthetic construct
AAAAAGGEGRHRGAE

SEQ ID NO: 9524 - protein, 15 aa, synthetic construct
AAASPAAVSPCAASL

SEQ ID NO: 9525 - protein, 15 aa, synthetic construct
AACSHSLPPGAPPHC

SEQ ID NO: 9526 - protein, 15 aa, synthetic construct
AAGLPAPDQGARAGP

SEQ ID NO: 9527 - protein, 15 aa, synthetic construct
AAGSSSGAWNPVPPP

SEQ ID NO: 9528 - protein, 15 aa, synthetic construct
AAHQPPGDLGLGSGV

SEQ ID NO: 9529 - protein, 15 aa, synthetic construct
AAPGAATAAAAPAAA

SEQ ID NO: 9530 - protein, 15 aa, synthetic construct
AAPGAAVPGVPSPHS

SEQ ID NO: 9531 - protein, 15 aa, synthetic construct
AAPGASGLPGPWRSG

SEQ ID NO: 9532 - protein, 15 aa, synthetic construct
AAPPVPAGRGGPRRR

SEQ ID NO: 9533 - protein, 15 aa, synthetic construct
AAPQGFDPGAKPSQH

SEQ ID NO: 9534 - protein, 15 aa, synthetic construct
AAPQRPAPPAAAAAA

SEQ ID NO: 9535 - protein, 15 aa, synthetic construct
AAPRSPGTRPAAPRA

SEQ ID NO: 9536 - protein, 15 aa, synthetic construct
AAQLHAARPRPAAPG

SEQ ID NO: 9537 - protein, 15 aa, synthetic construct
AARPGAPRPRGLGGA

SEQ ID NO: 9538 - protein, 15 aa, synthetic construct
AASPAAANPAAASLA

SEQ ID NO: 9539 - protein, 15 aa, synthetic construct
AASPPPPPPPPPPLP

SEQ ID NO: 9540 - protein, 15 aa, synthetic construct
AATAAAAPPPAPAPS

SEQ ID NO: 9541 - protein, 15 aa, synthetic construct
AAVPGAPHVLHALPA

SEQ ID NO: 9542 - protein, 15 aa, synthetic construct
AEGNPTPPSAPGGPG

SEQ ID NO: 9543 - protein, 15 aa, synthetic construct
AGHPGRDEAPAPAPA

SEQ ID NO: 9544 - protein, 15 aa, synthetic construct
AGPRREREPGTARRA

SEQ ID NO: 9545 - protein, 15 aa, synthetic construct
AHVHAAAAAGAGPGQ

SEQ ID NO: 9546 - protein, 15 aa, synthetic construct
APASPPGKMPSPLCG

SEQ ID NO: 9547 - protein, 15 aa, synthetic construct
APGSPAAPALAAGAP

SEQ ID NO: 9548 - protein, 15 aa, synthetic construct
AQRALYGAEPGRAES

SEQ ID NO: 9549 - protein, 15 aa, synthetic construct
ARAPGGRPLLPGAGG

SEQ ID NO: 9550 - protein, 15 aa, synthetic construct
ARCPGSGDGRPPCFG

SEQ ID NO: 9551 - protein, 15 aa, synthetic construct
ARLPGGAPSRPRRVP

SEQ ID NO: 9552 - protein, 15 aa, synthetic construct
ARNPGSRPGAPEARQ

SEQ ID NO: 9553 - protein, 15 aa, synthetic construct
ARPTSTPAAPAPPPA

SEQ ID NO: 9554 - protein, 15 aa, synthetic construct
ARQRPAAPPAAAAAV

SEQ ID NO: 9555 - protein, 15 aa, synthetic construct
ASPAWALSCPPPLPP

SEQ ID NO: 9556 - protein, 15 aa, synthetic construct
ASRAGMWRCRWAAAR

SEQ ID NO: 9557 - protein, 15 aa, synthetic construct
ATNPASAGLPPAAQG

SEQ ID NO: 9558 - protein, 15 aa, synthetic construct
ATTRRAPRSPPTCSG

SEQ ID NO: 9559 - protein, 15 aa, synthetic construct
CAAGRLVPGAPSVRR

SEQ ID NO: 9560 - protein, 15 aa, synthetic construct
CATPAAPQPASQPAA

SEQ ID NO: 9561 - protein, 15 aa, synthetic construct
CATPAAPRAASQPAA

SEQ ID NO: 9562 - protein, 15 aa, synthetic construct
CCCRSSQPPPPPPAP

SEQ ID NO: 9563 - protein, 15 aa, synthetic construct
CCRRWPPAPRTATAT

SEQ ID NO: 9564 - protein, 15 aa, synthetic construct
CGLGTPGAPHSSGCP

SEQ ID NO: 9565 - protein, 15 aa, synthetic construct
CGPNPASLPAPRCRK

SEQ ID NO: 9566 - protein, 15 aa, synthetic construct
CGPNPASLPTPRCQK

SEQ ID NO: 9567 - protein, 15 aa, synthetic construct
CLAAPTESALVTGWA

SEQ ID NO: 9568 - protein, 15 aa, synthetic construct
CLAVALLGNASPCQP

SEQ ID NO: 9569 - protein, 15 aa, synthetic construct
CPAANRATRSTCPRG

SEQ ID NO: 9570 - protein, 15 aa, synthetic construct
CPAAPGRASNPPSTS

SEQ ID NO: 9571 - protein, 15 aa, synthetic construct
CPGAPKMAGPGGGAR

SEQ ID NO: 9572 - protein, 15 aa, synthetic construct
CPGRPAAPSFGTWSW

SEQ ID NO: 9573 - protein, 15 aa, synthetic construct
CPPAPSAMWRTFKRW

SEQ ID NO: 9574 - protein, 15 aa, synthetic construct
CPTNPSPLLPAAPLA

SEQ ID NO: 9575 - protein, 15 aa, synthetic construct
CPTTVALETSPPAPT

SEQ ID NO: 9576 - protein, 15 aa, synthetic construct
CQPALRPASPTSTAP

SEQ ID NO: 9577 - protein, 15 aa, synthetic construct
CRGVPAPAAPAATCP

SEQ ID NO: 9578 - protein, 15 aa, synthetic construct
CRPAAPRAPVRCSPS

SEQ ID NO: 9579 - protein, 15 aa, synthetic construct
CRPPPGPLTRPPAPG

SEQ ID NO: 9580 - protein, 15 aa, synthetic construct
CRRPSSTPASPSART

SEQ ID NO: 9581 - protein, 15 aa, synthetic construct
CSGPPGANRSELQQP

SEQ ID NO: 9582 - protein, 15 aa, synthetic construct
CSLFHPSPPGSPASP

SEQ ID NO: 9583 - protein, 15 aa, synthetic construct
CYSAWPPAPSGATSP

SEQ ID NO: 9584 - protein, 15 aa, synthetic construct
DFPPGAPGDQLAAVF

SEQ ID NO: 9585 - protein, 15 aa, synthetic construct
DPAPLTPPAPSAAAA

SEQ ID NO: 9586 - protein, 15 aa, synthetic construct
DQGGRGWVPGAPVYL

SEQ ID NO: 9587 - protein, 15 aa, synthetic construct
ETVTPAAPSGALTVF

SEQ ID NO: 9588 - protein, 15 aa, synthetic construct
FGLAPPPAPAPPGQA

SEQ ID NO: 9589 - protein, 15 aa, synthetic construct
FLPAAPGSRPAAAPL

SEQ ID NO: 9590 - protein, 15 aa, synthetic construct
FPNPANMGSASFHGR

SEQ ID NO: 9591 - protein, 15 aa, synthetic construct
GAEEVGVPGAPAGLG

SEQ ID NO: 9592 - protein, 15 aa, synthetic construct
GAGGPWPPPPPSPDV

SEQ ID NO: 9593 - protein, 15 aa, synthetic construct
GAQLCAPGGRHRHGL

SEQ ID NO: 9594 - protein, 15 aa, synthetic construct
GAVRWAAPPSPRPVL

SEQ ID NO: 9595 - protein, 15 aa, synthetic construct
GDLRRSTPAAPLPLP

SEQ ID NO: 9596 - protein, 15 aa, synthetic construct
GEQSPPPPPPPAAPA

SEQ ID NO: 9597 - protein, 15 aa, synthetic construct
GGCNPAAALAAAGPP

SEQ ID NO: 9598 - protein, 15 aa, synthetic construct
GGQAAAAAGAPRALR

SEQ ID NO: 9599 - protein, 15 aa, synthetic construct
GGVRWPPPPGAPRAV

SEQ ID NO: 9600 - protein, 15 aa, synthetic construct
GGWALRPAANGAPGR

SEQ ID NO: 9601 - protein, 15 aa, synthetic construct
GLRPPAPARATVGAA

SEQ ID NO: 9602 - protein, 15 aa, synthetic construct
GLSTRQGYWPPVAPV

SEQ ID NO: 9603 - protein, 15 aa, synthetic construct
GNPNDSLQIRLHLYH

SEQ ID NO: 9604 - protein, 15 aa, synthetic construct
GPAPVPAALRVLDAL

SEQ ID NO: 9605 - protein, 15 aa, synthetic construct
GPARAAGAGLAGASA

SEQ ID NO: 9606 - protein, 15 aa, synthetic construct
GPPAPPAAAAAPRGL

SEQ ID NO: 9607 - protein, 15 aa, synthetic construct
GPRPPGPGVPLAAAL

SEQ ID NO: 9608 - protein, 15 aa, synthetic construct
GPRRPRCTRGPPAAP

SEQ ID NO: 9609 - protein, 15 aa, synthetic construct
GPWPPPAPCTARRRT

SEQ ID NO: 9610 - protein, 15 aa, synthetic construct
GRGVPAPAAAAAARL

SEQ ID NO: 9611 - protein, 15 aa, synthetic construct
GSNVAPVCGVGGLGM

SEQ ID NO: 9612 - protein, 15 aa, synthetic construct
GTHLRSQPAAPATNP

SEQ ID NO: 9613 - protein, 15 aa, synthetic construct
GTSRCSLPRPPAPAA

SEQ ID NO: 9614 - protein, 15 aa, synthetic construct
GVGLGPGQAHTEWAA

SEQ ID NO: 9615 - protein, 15 aa, synthetic construct
HLAGARLRAGRGDRY

SEQ ID NO: 9616 - protein, 15 aa, synthetic construct
HRLPPPGAPRRPHRR

SEQ ID NO: 9617 - protein, 15 aa, synthetic construct
LATAAPAPPGSPAPT

SEQ ID NO: 9618 - protein, 15 aa, synthetic construct
LHQEPAQRRPPPAAP

SEQ ID NO: 9619 - protein, 15 aa, synthetic construct
LLGPRRPGAPELRSP

SEQ ID NO: 9620 - protein, 15 aa, synthetic construct
LLPGRPPTPGAPRAA

SEQ ID NO: 9621 - protein, 15 aa, synthetic construct
LPAPRQPGLQPRAGL

SEQ ID NO: 9622 - protein, 15 aa, synthetic construct
LRPAAPGPGPAPAQA

SEQ ID NO: 9623 - protein, 15 aa, synthetic construct
LRPPAPASLHVGGPK

SEQ ID NO: 9624 - protein, 15 aa, synthetic construct
LSREVAASRPSPMST

SEQ ID NO: 9625 - protein, 15 aa, synthetic construct
MAAPTLQWAMASAMA

SEQ ID NO: 9626 - protein, 15 aa, synthetic construct
MGNPAPTDDCDSWGP

SEQ ID NO: 9627 - protein, 15 aa, synthetic construct
NAAARRATLCMCTRC

SEQ ID NO: 9628 - protein, 15 aa, synthetic construct
NAAGRAASALAGLAD

SEQ ID NO: 9629 - protein, 15 aa, synthetic construct
NAARARQLQAQGQEQ

SEQ ID NO: 9630 - protein, 15 aa, synthetic construct
NAISMTAMARRGRRA

SEQ ID NO: 9631 - protein, 15 aa, synthetic construct
NASDSSWERRMTAQL

SEQ ID NO: 9632 - protein, 15 aa, synthetic construct
NGATSTPPAWSAPPR

SEQ ID NO: 9633 - protein, 15 aa, synthetic construct
NISPRRRSMWARIQS

SEQ ID NO: 9634 - protein, 15 aa, synthetic construct
NPAAAGPPAAAPAAA

SEQ ID NO: 9635 - protein, 15 aa, synthetic construct
NPAAARPPAAAPAAV

SEQ ID NO: 9636 - protein, 15 aa, synthetic construct
NPDPLLHHPLPAPSR

SEQ ID NO: 9637 - protein, 15 aa, synthetic construct
NPHAPVGDARGGDVW

SEQ ID NO: 9638 - protein, 15 aa, synthetic construct
NPWSDPQDCRGRHWR

SEQ ID NO: 9639 - protein, 15 aa, synthetic construct
NVASDSGGVYVPEKC

SEQ ID NO: 9640 - protein, 15 aa, synthetic construct
PAAGIESSERHQTVG

SEQ ID NO: 9641 - protein, 15 aa, synthetic construct
PAAGTRDPRAEPAEP

SEQ ID NO: 9642 - protein, 15 aa, synthetic construct
PAAQKRRALLRRALA

SEQ ID NO: 9643 - protein, 15 aa, synthetic construct
PAASGEEKLPDVWHS

SEQ ID NO: 9644 - protein, 15 aa, synthetic construct
PACCGTGGSSGASTS

SEQ ID NO: 9645 - protein, 15 aa, synthetic construct
PACDASLEEPDSLSR

SEQ ID NO: 9646 - protein, 15 aa, synthetic construct
PACPRLPAFSACAYI

SEQ ID NO: 9647 - protein, 15 aa, synthetic construct
PACWTAERPHRRAGR

SEQ ID NO: 9648 - protein, 15 aa, synthetic construct
PADPRQPHRRGANAD

SEQ ID NO: 9649 - protein, 15 aa, synthetic construct
PADQDQFPPANTHVF

SEQ ID NO: 9650 - protein, 15 aa, synthetic construct
PADVPVHAAGQPAHH

SEQ ID NO: 9651 - protein, 15 aa, synthetic construct
PAEAREVATCCTAAG

SEQ ID NO: 9652 - protein, 15 aa, synthetic construct
PAEASLQLHRAHRHG

SEQ ID NO: 9653 - protein, 15 aa, synthetic construct
PAEEPVLDHLHPGRA

SEQ ID NO: 9654 - protein, 15 aa, synthetic construct
PAEPGALFQRARRAA

SEQ ID NO: 9655 - protein, 15 aa, synthetic construct
PAFLGCARSFLCASS

SEQ ID NO: 9656 - protein, 15 aa, synthetic construct
PAFPAHAVPGAAREG

SEQ ID NO: 9657 - protein, 15 aa, synthetic construct
PAFRLPAARPSSSCF

SEQ ID NO: 9658 - protein, 15 aa, synthetic construct
PAFSEPAEQVTRTRI

SEQ ID NO: 9659 - protein, 15 aa, synthetic construct
PAFSEPAKQVTRTRI

SEQ ID NO: 9660 - protein, 15 aa, synthetic construct
PAGAGQPLTPRGLTA

SEQ ID NO: 9661 - protein, 15 aa, synthetic construct
PAGALRRLPEGASPG

SEQ ID NO: 9662 - protein, 15 aa, synthetic construct
PAGDPGAAPGRRQQA

SEQ ID NO: 9663 - protein, 15 aa, synthetic construct
PAGDRCLREVYRPRR

SEQ ID NO: 9664 - protein, 15 aa, synthetic construct
PAGGVARAPGEIPQA

SEQ ID NO: 9665 - protein, 15 aa, synthetic construct
PAGHQAAAAALLQRG

SEQ ID NO: 9666 - protein, 15 aa, synthetic construct
PAGLRPQRALRSGLG

SEQ ID NO: 9667 - protein, 15 aa, synthetic construct
PAGLSQPPGTHRTRR

SEQ ID NO: 9668 - protein, 15 aa, synthetic construct
PAGQGWVLWPIKPPR

SEQ ID NO: 9669 - protein, 15 aa, synthetic construct
PAGRPLGIPGPRPGS

SEQ ID NO: 9670 - protein, 15 aa, synthetic construct
PAGRPTPAPRRRPGH

SEQ ID NO: 9671 - protein, 15 aa, synthetic construct
PAGRQPRGGAAATAA

SEQ ID NO: 9672 - protein, 15 aa, synthetic construct
PAGRTRSSASCIGKW

SEQ ID NO: 9673 - protein, 15 aa, synthetic construct
PAGVAGRSKGSWSAW

SEQ ID NO: 9674 - protein, 15 aa, synthetic construct
PAGVEGGGGRGRAHR

SEQ ID NO: 9675 - protein, 15 aa, synthetic construct
PAGVTPTRVNAPHTP

SEQ ID NO: 9676 - protein, 15 aa, synthetic construct
PAHHAGGVALPRAAH

SEQ ID NO: 9677 - protein, 15 aa, synthetic construct
PAHLPLCPGGEPGHH

SEQ ID NO: 9678 - protein, 15 aa, synthetic construct
PAHLPPRVGRAGPAA

SEQ ID NO: 9679 - protein, 15 aa, synthetic construct
PAIWSTALTSALPAP

SEQ ID NO: 9680 - protein, 15 aa, synthetic construct
PALALVWVVEPALLV

SEQ ID NO: 9681 - protein, 15 aa, synthetic construct
PALAVPRRPGGPLLL

SEQ ID NO: 9682 - protein, 15 aa, synthetic construct
PALGARLQLPRRGAA

SEQ ID NO: 9683 - protein, 15 aa, synthetic construct
PALLCSGQSGACGRS

SEQ ID NO: 9684 - protein, 15 aa, synthetic construct
PALPPAAGWSFFSPV

SEQ ID NO: 9685 - protein, 15 aa, synthetic construct
PALQGSVPGSYLAAA

SEQ ID NO: 9686 - protein, 15 aa, synthetic construct
PALQHAAGHQDVRGG

SEQ ID NO: 9687 - protein, 15 aa, synthetic construct
PALQKSPAPFLPDQA

SEQ ID NO: 9688 - protein, 15 aa, synthetic construct
PALRTHCWTVAAAAG

SEQ ID NO: 9689 - protein, 15 aa, synthetic construct
PAMRRPTSLCTGSAC

SEQ ID NO: 9690 - protein, 15 aa, synthetic construct
PAPAGRLRPQPSEDH

SEQ ID NO: 9691 - protein, 15 aa, synthetic construct
PAPARRHRRRPGRPP

SEQ ID NO: 9692 - protein, 15 aa, synthetic construct
PAPFCSRPPHPPPQP

SEQ ID NO: 9693 - protein, 15 aa, synthetic construct
PAPGARRPGPRARCG

SEQ ID NO: 9694 - protein, 15 aa, synthetic construct
PAPRAKANTPARGAT

SEQ ID NO: 9695 - protein, 15 aa, synthetic construct
PAPVWGIHLLPASLL

SEQ ID NO: 9696 - protein, 15 aa, synthetic construct
PAQDAVGHGVGLQRG

SEQ ID NO: 9697 - protein, 15 aa, synthetic construct
PAQPGSPLGHHHCSA

SEQ ID NO: 9698 - protein, 15 aa, synthetic construct
PAQSHASARRRCRRL

SEQ ID NO: 9699 - protein, 15 aa, synthetic construct
PARAAGDPGPHRALS

SEQ ID NO: 9700 - protein, 15 aa, synthetic construct
PARAPAGARAPAPVP

SEQ ID NO: 9701 - protein, 15 aa, synthetic construct
PARASTARARVPGPT

SEQ ID NO: 9702 - protein, 15 aa, synthetic construct
PARCPASARTCPSRS

SEQ ID NO: 9703 - protein, 15 aa, synthetic construct
PARCSAYSRRWRRWT

SEQ ID NO: 9704 - protein, 15 aa, synthetic construct
PARCSSGCRAGPANG

SEQ ID NO: 9705 - protein, 15 aa, synthetic construct
PARESRPAGAPWTTR

SEQ ID NO: 9706 - protein, 15 aa, synthetic construct
PARGRPPGPGAGQGG

SEQ ID NO: 9707 - protein, 15 aa, synthetic construct
PARHAAPAGRLQQRG

SEQ ID NO: 9708 - protein, 15 aa, synthetic construct
PARLLPPLPRGAPAA

SEQ ID NO: 9709 - protein, 15 aa, synthetic construct
PARMSSAALLRAPRS

SEQ ID NO: 9710 - protein, 15 aa, synthetic construct
PARPAPAAAPPALPP

SEQ ID NO: 9711 - protein, 15 aa, synthetic construct
PARPGGCPLASTPPP

SEQ ID NO: 9712 - protein, 15 aa, synthetic construct
PARPGPAGRRRRSLP

SEQ ID NO: 9713 - protein, 15 aa, synthetic construct
PARRAPAPGRAAGPH

SEQ ID NO: 9714 - protein, 15 aa, synthetic construct
PARRAPGGAAPAAAQ

SEQ ID NO: 9715 - protein, 15 aa, synthetic construct
PARRGLSAGGALALP

SEQ ID NO: 9716 - protein, 15 aa, synthetic construct
PARSGPWPPPPPSWP

SEQ ID NO: 9717 - protein, 15 aa, synthetic construct
PARVPLPAGAETPGS

SEQ ID NO: 9718 - protein, 15 aa, synthetic construct
PASAVLLPALCPPLA

SEQ ID NO: 9719 - protein, 15 aa, synthetic construct
PASCSASSGPCSNPG

SEQ ID NO: 9720 - protein, 15 aa, synthetic construct
PASCTGCCRCAASSR

SEQ ID NO: 9721 - protein, 15 aa, synthetic construct
PASGAQAGAGRWPAS

SEQ ID NO: 9722 - protein, 15 aa, synthetic construct
PASGHPQPRRPEAPG

SEQ ID NO: 9723 - protein, 15 aa, synthetic construct
PASRGRRRGRGRRGG

SEQ ID NO: 9724 - protein, 15 aa, synthetic construct
PASSASSGLAPAGSP

SEQ ID NO: 9725 - protein, 15 aa, synthetic construct
PASSLGTPATSVPRL

SEQ ID NO: 9726 - protein, 15 aa, synthetic construct
PASTARSWLWPLAGP

SEQ ID NO: 9727 - protein, 15 aa, synthetic construct
PATAPTLLSAQRAAA

SEQ ID NO: 9728 - protein, 15 aa, synthetic construct
PATRSSSLSSWSSSR

SEQ ID NO: 9729 - protein, 15 aa, synthetic construct
PATRSTALTSALPAR

SEQ ID NO: 9730 - protein, 15 aa, synthetic construct
PATWSTALTSALPAP

SEQ ID NO: 9731 - protein, 15 aa, synthetic construct
PAVDAGRCTPPAAGA

SEQ ID NO: 9732 - protein, 15 aa, synthetic construct
PAVLPDGAHAAAAAV

SEQ ID NO: 9733 - protein, 15 aa, synthetic construct
PAVTTVPHPATFLSP

SEQ ID NO: 9734 - protein, 15 aa, synthetic construct
PCAPPKAPASSCVSI

SEQ ID NO: 9735 - protein, 15 aa, synthetic construct
PCATCRTRWPAPAAR

SEQ ID NO: 9736 - protein, 15 aa, synthetic construct
PDAARGHVGGDLPRQ

SEQ ID NO: 9737 - protein, 15 aa, synthetic construct
PDSRGCRCRCCCCWR

SEQ ID NO: 9738 - protein, 15 aa, synthetic construct
PEPPRGAPRPPPPPQ

SEQ ID NO: 9739 - protein, 15 aa, synthetic construct
PFCSHRLPPAPSAAL

SEQ ID NO: 9740 - protein, 15 aa, synthetic construct
PGAAAAAQPELGAGG

SEQ ID NO: 9741 - protein, 15 aa, synthetic construct
PGAAAARAPRGTGSS

SEQ ID NO: 9742 - protein, 15 aa, synthetic construct
PGAACGLRAGGGLHC

SEQ ID NO: 9743 - protein, 15 aa, synthetic construct
PGAAGRAPQRAGRPG

SEQ ID NO: 9744 - protein, 15 aa, synthetic construct
PGAAMGSPSGIRRGP

SEQ ID NO: 9745 - protein, 15 aa, synthetic construct
PGAAQPGPVPRHRVP

SEQ ID NO: 9746 - protein, 15 aa, synthetic construct
PGAARRRLQPQLQLG

SEQ ID NO: 9747 - protein, 15 aa, synthetic construct
PGADAQVPFGPAGPH

SEQ ID NO: 9748 - protein, 15 aa, synthetic construct
PGAGDAALRPQLLSR

SEQ ID NO: 9749 - protein, 15 aa, synthetic construct
PGAGSPELELWAQRT

SEQ ID NO: 9750 - protein, 15 aa, synthetic construct
PGAGTRRDRRSPRTP

SEQ ID NO: 9751 - protein, 15 aa, synthetic construct
PGAHRLAREAHETPA

SEQ ID NO: 9752 - protein, 15 aa, synthetic construct
PGALSLRPRTGGPGA

SEQ ID NO: 9753 - protein, 15 aa, synthetic construct
PGAQGLPLPARLGGQ

SEQ ID NO: 9754 - protein, 15 aa, synthetic construct
PGAQVISLPPLLPGG

SEQ ID NO: 9755 - protein, 15 aa, synthetic construct
PGARAGAARGGGERG

SEQ ID NO: 9756 - protein, 15 aa, synthetic construct
PGARAPAVRRRQWLQ

SEQ ID NO: 9757 - protein, 15 aa, synthetic construct
PGARARRWRSRRRRS

SEQ ID NO: 9758 - protein, 15 aa, synthetic construct
PGARCGRDLRGPEHV

SEQ ID NO: 9759 - protein, 15 aa, synthetic construct
PGARHAHHQSGGRRA

SEQ ID NO: 9760 - protein, 15 aa, synthetic construct
PGARHSRHAQPPARA

SEQ ID NO: 9761 - protein, 15 aa, synthetic construct
PGARPLGPRWRSVSA

SEQ ID NO: 9762 - protein, 15 aa, synthetic construct
PGARQEAGDLPGGGN

SEQ ID NO: 9763 - protein, 15 aa, synthetic construct
PGARTRAGRQLRGTR

SEQ ID NO: 9764 - protein, 15 aa, synthetic construct
PGASCGSTTCRGPGA

SEQ ID NO: 9765 - protein, 15 aa, synthetic construct
PGASPSSNPLRPPHQ

SEQ ID NO: 9766 - protein, 15 aa, synthetic construct
PGAVALLCPRELWLH

SEQ ID NO: 9767 - protein, 15 aa, synthetic construct
PGAVPRVPADDARRA

SEQ ID NO: 9768 - protein, 15 aa, synthetic construct
PGAVSGRGGVQRRPH

SEQ ID NO: 9769 - protein, 15 aa, synthetic construct
PGAYHTLLAGFPTVF

SEQ ID NO: 9770 - protein, 15 aa, synthetic construct
PGCGGAGGQGQVPGG

SEQ ID NO: 9771 - protein, 15 aa, synthetic construct
PGCKGLPHSPVQVPV

SEQ ID NO: 9772 - protein, 15 aa, synthetic construct
PGCPGPAPAFYIPRA

SEQ ID NO: 9773 - protein, 15 aa, synthetic construct
PGCWAASGPGPCAAC

SEQ ID NO: 9774 - protein, 15 aa, synthetic construct
PGDCTWTPKTGERSW

SEQ ID NO: 9775 - protein, 15 aa, synthetic construct
PGDRYPPRPKVPGGP

SEQ ID NO: 9776 - protein, 15 aa, synthetic construct
PGGAAGRGLRSLGQP

SEQ ID NO: 9777 - protein, 15 aa, synthetic construct
PGGVPPLLDALPPEH

SEQ ID NO: 9778 - protein, 15 aa, synthetic construct
PGHMLRLPPPHPHVL

SEQ ID NO: 9779 - protein, 15 aa, synthetic construct
PGHPVGVSEQEAQER

SEQ ID NO: 9780 - protein, 15 aa, synthetic construct
PGIASQTSARGFPRL

SEQ ID NO: 9781 - protein, 15 aa, synthetic construct
PGKALPWPLLPLLSG

SEQ ID NO: 9782 - protein, 15 aa, synthetic construct
PGKPGGSTGRGGRSW

SEQ ID NO: 9783 - protein, 15 aa, synthetic construct
PGLAAHAAAPAAGGA

SEQ ID NO: 9784 - protein, 15 aa, synthetic construct
PGMPGARRAPVAAWR

SEQ ID NO: 9785 - protein, 15 aa, synthetic construct
PGNLCGHSSGQPGHD

SEQ ID NO: 9786 - protein, 15 aa, synthetic construct
PGPAACEPGQLKAES

SEQ ID NO: 9787 - protein, 15 aa, synthetic construct
PGPAGPRYDKIRTPA

SEQ ID NO: 9788 - protein, 15 aa, synthetic construct
PGPAQRGDGPRDPEG

SEQ ID NO: 9789 - protein, 15 aa, synthetic construct
PGPAWGAVPRGGIRG

SEQ ID NO: 9790 - protein, 15 aa, synthetic construct
PGPGAPAALQLLERL

SEQ ID NO: 9791 - protein, 15 aa, synthetic construct
PGPGCPRRLLRGALQ

SEQ ID NO: 9792 - protein, 15 aa, synthetic construct
PGPGLPGRDRGERAG

SEQ ID NO: 9793 - protein, 15 aa, synthetic construct
PGPGTCPAPACRSRP

SEQ ID NO: 9794 - protein, 15 aa, synthetic construct
PGPLLVHHAPHGIHA

SEQ ID NO: 9795 - protein, 15 aa, synthetic construct
PGPLRPGALGEVLRR

SEQ ID NO: 9796 - protein, 15 aa, synthetic construct
PGPPRPLRGRSPGSP

SEQ ID NO: 9797 - protein, 15 aa, synthetic construct
PGPRRGGGAGHGAAR

SEQ ID NO: 9798 - protein, 15 aa, synthetic construct
PGPSGAASARPQDPP

SEQ ID NO: 9799 - protein, 15 aa, synthetic construct
PGPVGHVSRAEQPRA

SEQ ID NO: 9800 - protein, 15 aa, synthetic construct
PGPVLPGHPLGPGLQ

SEQ ID NO: 9801 - protein, 15 aa, synthetic construct
PGPVTTSRTRIVADT

SEQ ID NO: 9802 - protein, 15 aa, synthetic construct
PGPWTPTLTQCPRSP

SEQ ID NO: 9803 - protein, 15 aa, synthetic construct
PGQAGGGVRPPAPAA

SEQ ID NO: 9804 - protein, 15 aa, synthetic construct
PGQAGVHSPPSAPSR

SEQ ID NO: 9805 - protein, 15 aa, synthetic construct
PGSAWTGAFSRGQGS

SEQ ID NO: 9806 - protein, 15 aa, synthetic construct
PGSFGLHHLSDSAVP

SEQ ID NO: 9807 - protein, 15 aa, synthetic construct
PGSGGAQELGAGPRA

SEQ ID NO: 9808 - protein, 15 aa, synthetic construct
PGSGGPRDAGPHRVS

SEQ ID NO: 9809 - protein, 15 aa, synthetic construct
PGSGLAPPGSWAPPP

SEQ ID NO: 9810 - protein, 15 aa, synthetic construct
PGSRGAAARPAGPLQ

SEQ ID NO: 9811 - protein, 15 aa, synthetic construct
PGSSAPGASAACRTW

SEQ ID NO: 9812 - protein, 15 aa, synthetic construct
PGSVPLATSPPRRLC

SEQ ID NO: 9813 - protein, 15 aa, synthetic construct
PGVPAWALLNGTGWP

SEQ ID NO: 9814 - protein, 15 aa, synthetic construct
PGWGAAAPAPEPGWV

SEQ ID NO: 9815 - protein, 15 aa, synthetic construct
PHAADRARALPAALR

SEQ ID NO: 9816 - protein, 15 aa, synthetic construct
PHAPRPVLPAVPQTA

SEQ ID NO: 9817 - protein, 15 aa, synthetic construct
PHPAGPGPPAASQAW

SEQ ID NO: 9818 - protein, 15 aa, synthetic construct
PHPCRSWSSSPSGCT

SEQ ID NO: 9819 - protein, 15 aa, synthetic construct
PHPLSRSEDGTLLPR

SEQ ID NO: 9820 - protein, 15 aa, synthetic construct
PHPPGTQRQPAPGGP

SEQ ID NO: 9821 - protein, 15 aa, synthetic construct
PKPHLQLFQWVWEQA

SEQ ID NO: 9822 - protein, 15 aa, synthetic construct
PKPHQEVHQRHLARL

SEQ ID NO: 9823 - protein, 15 aa, synthetic construct
PLAPGAQRARGRCRL

SEQ ID NO: 9824 - protein, 15 aa, synthetic construct
PNAGRGCRGPTGPGP

SEQ ID NO: 9825 - protein, 15 aa, synthetic construct
PNGCWQCDRFSPRRR

SEQ ID NO: 9826 - protein, 15 aa, synthetic construct
PPAACRAQPRAPRRR

SEQ ID NO: 9827 - protein, 15 aa, synthetic construct
PPAAGVAGMGGPAAG

SEQ ID NO: 9828 - protein, 15 aa, synthetic construct
PPAGAAAAEAQRAPG

SEQ ID NO: 9829 - protein, 15 aa, synthetic construct
PPAGAGEPEAPGEAL

SEQ ID NO: 9830 - protein, 15 aa, synthetic construct
PPAGAGPFPVGERGA

SEQ ID NO: 9831 - protein, 15 aa, synthetic construct
PPAGISWPPGVPGAG

SEQ ID NO: 9832 - protein, 15 aa, synthetic construct
PPAGLPVRPTALLHQ

SEQ ID NO: 9833 - protein, 15 aa, synthetic construct
PPAGRQHPGRPARRT

SEQ ID NO: 9834 - protein, 15 aa, synthetic construct
PPAHGARAQRPLRER

SEQ ID NO: 9835 - protein, 15 aa, synthetic construct
PPAHTGRAGAAPRGG

SEQ ID NO: 9836 - protein, 15 aa, synthetic construct
PPALAVRWGAGAGGW

SEQ ID NO: 9837 - protein, 15 aa, synthetic construct
PPALGLHRRLLLRGH

SEQ ID NO: 9838 - protein, 15 aa, synthetic construct
PPALPPRAPGLRCRS

SEQ ID NO: 9839 - protein, 15 aa, synthetic construct
PPALWRAGGSPAGRR

SEQ ID NO: 9840 - protein, 15 aa, synthetic construct
PPARLPRPARRQWPP

SEQ ID NO: 9841 - protein, 15 aa, synthetic construct
PPASAPPSTCWRSGS

SEQ ID NO: 9842 - protein, 15 aa, synthetic construct
PPASFLCSTLMEPMP

SEQ ID NO: 9843 - protein, 15 aa, synthetic construct
PPATWTAGWSPCTSA

SEQ ID NO: 9844 - protein, 15 aa, synthetic construct
PPAVELVEAPEPPPP

SEQ ID NO: 9845 - protein, 15 aa, synthetic construct
PPCGYPRTAIFTSLA

SEQ ID NO: 9846 - protein, 15 aa, synthetic construct
PPCLQLPTSSQTPAP

SEQ ID NO: 9847 - protein, 15 aa, synthetic construct
PPCPSGCRLTRVQLC

SEQ ID NO: 9848 - protein, 15 aa, synthetic construct
PPCVPVHGPPAPAAA

SEQ ID NO: 9849 - protein, 15 aa, synthetic construct
PPCWACPTSRAEARA

SEQ ID NO: 9850 - protein, 15 aa, synthetic construct
PPGCPLLPHQHLAGR

SEQ ID NO: 9851 - protein, 15 aa, synthetic construct
PPGFPGLAPGLRLQP

SEQ ID NO: 9852 - protein, 15 aa, synthetic construct
PPGGVGAEWENWRTE

SEQ ID NO: 9853 - protein, 15 aa, synthetic construct
PPGGWSSAGSGAVSV

SEQ ID NO: 9854 - protein, 15 aa, synthetic construct
PPGLAQPRAGPSHVR

SEQ ID NO: 9855 - protein, 15 aa, synthetic construct
PPGRAVAAQDHASTF

SEQ ID NO: 9856 - protein, 15 aa, synthetic construct
PPGSCLSCWEASPFS

SEQ ID NO: 9857 - protein, 15 aa, synthetic construct
PPGVSLAHFVPCFLM

SEQ ID NO: 9858 - protein, 15 aa, synthetic construct
PPHAPHQGSGGNRAL

SEQ ID NO: 9859 - protein, 15 aa, synthetic construct
PPHAPQPGDRPQRAV

SEQ ID NO: 9860 - protein, 15 aa, synthetic construct
PPHGPRAAVPALPPL

SEQ ID NO: 9861 - protein, 15 aa, synthetic construct
PPHPGAQYRQHQWAA

SEQ ID NO: 9862 - protein, 15 aa, synthetic construct
PPKSSTARASTCCWR

SEQ ID NO: 9863 - protein, 15 aa, synthetic construct
PPLAAEPTALAHLSL

SEQ ID NO: 9864 - protein, 15 aa, synthetic construct
PPLAPTRCPSPSPLP

SEQ ID NO: 9865 - protein, 15 aa, synthetic construct
PPMHHYRVGQREPPH

SEQ ID NO: 9866 - protein, 15 aa, synthetic construct
PPMLDTHAGQWLCGF

SEQ ID NO: 9867 - protein, 15 aa, synthetic construct
PPPAALSAPAAAAAA

SEQ ID NO: 9868 - protein, 15 aa, synthetic construct
PPPARAEGGGRGPAL

SEQ ID NO: 9869 - protein, 15 aa, synthetic construct
PPPGAGRVPAGPQEG

SEQ ID NO: 9870 - protein, 15 aa, synthetic construct
PPPHLWWPRAASSPC

SEQ ID NO: 9871 - protein, 15 aa, synthetic construct
PPPPAASAQRQLRVP

SEQ ID NO: 9872 - protein, 15 aa, synthetic construct
PPPPPPPPTPARPIC

SEQ ID NO: 9873 - protein, 15 aa, synthetic construct
PPPPRPRRPARAGSA

SEQ ID NO: 9874 - protein, 15 aa, synthetic construct
PPPSAHLIKAAAVES

SEQ ID NO: 9875 - protein, 15 aa, synthetic construct
PPPSAPPTNPAAVES

SEQ ID NO: 9876 - protein, 15 aa, synthetic construct
PPPSARAARPGPAVA

SEQ ID NO: 9877 - protein, 15 aa, synthetic construct
PPPSSPAASPIPAAW

SEQ ID NO: 9878 - protein, 15 aa, synthetic construct
PPPTPHPPSLPGSGR

SEQ ID NO: 9879 - protein, 15 aa, synthetic construct
PPPTSTECCRTSRAR

SEQ ID NO: 9880 - protein, 15 aa, synthetic construct
PPPYPSPPPYPSPPP

SEQ ID NO: 9881 - protein, 15 aa, synthetic construct
PPPYPSYDVQRNQTE

SEQ ID NO: 9882 - protein, 15 aa, synthetic construct
PPQSTVPYGPHAHLH

SEQ ID NO: 9883 - protein, 15 aa, synthetic construct
PPRLALQPAAPACRS

SEQ ID NO: 9884 - protein, 15 aa, synthetic construct
PPRTCAGPPAPPASN

SEQ ID NO: 9885 - protein, 15 aa, synthetic construct
PPSLGAPSAITTALP

SEQ ID NO: 9886 - protein, 15 aa, synthetic construct
PPSLPAELASLRLRL

SEQ ID NO: 9887 - protein, 15 aa, synthetic construct
PPSRACCGSARGSTS

SEQ ID NO: 9888 - protein, 15 aa, synthetic construct
PPSWPSAARAAPSAA

SEQ ID NO: 9889 - protein, 15 aa, synthetic construct
PPTRPGAPTRCCPRA

SEQ ID NO: 9890 - protein, 15 aa, synthetic construct
PPTSKPPPAWSCPPS

SEQ ID NO: 9891 - protein, 15 aa, synthetic construct
PPVPFRGDCNSPGRA

SEQ ID NO: 9892 - protein, 15 aa, synthetic construct
PPVPLAAANAARGPS

SEQ ID NO: 9893 - protein, 15 aa, synthetic construct
PPWTAPSATAPWPWR

SEQ ID NO: 9894 - protein, 15 aa, synthetic construct
PQAPASIIARPQASC

SEQ ID NO: 9895 - protein, 15 aa, synthetic construct
PQPAPPRLGAEWRPR

SEQ ID NO: 9896 - protein, 15 aa, synthetic construct
PQPVPPARVPGPLPH

SEQ ID NO: 9897 - protein, 15 aa, synthetic construct
PRAPPPPQPRPPPPQ

SEQ ID NO: 9898 - protein, 15 aa, synthetic construct
PRGPPAPWASRTSSP

SEQ ID NO: 9899 - protein, 15 aa, synthetic construct
PRPPAPRLPHAAGAR

SEQ ID NO: 9900 - protein, 15 aa, synthetic construct
PSAAAHPGLHRERHP

SEQ ID NO: 9901 - protein, 15 aa, synthetic construct
PSAAASPCAAVCQPV

SEQ ID NO: 9902 - protein, 15 aa, synthetic construct
PSAAGWLCACGAGSE

SEQ ID NO: 9903 - protein, 15 aa, synthetic construct
PSAARPAGQVAVRPG

SEQ ID NO: 9904 - protein, 15 aa, synthetic construct
PSARAPGLPAPEARS

SEQ ID NO: 9905 - protein, 15 aa, synthetic construct
PSARTGEARSPPPLS

SEQ ID NO: 9906 - protein, 15 aa, synthetic construct
PSATGAAWRRPSSAA

SEQ ID NO: 9907 - protein, 15 aa, synthetic construct
PSAWPTAWAWSWARW

SEQ ID NO: 9908 - protein, 15 aa, synthetic construct
PSAWRRSCPTRSRPR

SEQ ID NO: 9909 - protein, 15 aa, synthetic construct
PSAWSWSANTPSPCT

SEQ ID NO: 9910 - protein, 15 aa, synthetic construct
PSCCTWRQLTWASCS

SEQ ID NO: 9911 - protein, 15 aa, synthetic construct
PSCPGCSLCFAAPPL

SEQ ID NO: 9912 - protein, 15 aa, synthetic construct
PSCSASCAITNSQRW

SEQ ID NO: 9913 - protein, 15 aa, synthetic construct
PSESVSTSWSGGWTS

SEQ ID NO: 9914 - protein, 15 aa, synthetic construct
PSFPYRLQIDGPEER

SEQ ID NO: 9915 - protein, 15 aa, synthetic construct
PSGARLASSHGVRSV

SEQ ID NO: 9916 - protein, 15 aa, synthetic construct
PSGPAGPSGPSFASS

SEQ ID NO: 9917 - protein, 15 aa, synthetic construct
PSGWTRSPTTAPRSP

SEQ ID NO: 9918 - protein, 15 aa, synthetic construct
PSLAAPSLSSSLRSM

SEQ ID NO: 9919 - protein, 15 aa, synthetic construct
PSLTLLSPLRSGASW

SEQ ID NO: 9920 - protein, 15 aa, synthetic construct
PSPCGLCGHAAGESF

SEQ ID NO: 9921 - protein, 15 aa, synthetic construct
PSPGLPAPLRSAWRQ

SEQ ID NO: 9922 - protein, 15 aa, synthetic construct
PSPGPRGTRAPRAVS

SEQ ID NO: 9923 - protein, 15 aa, synthetic construct
PSPITSPWTRRGPWS

SEQ ID NO: 9924 - protein, 15 aa, synthetic construct
PSPPPCRACASTRTC

SEQ ID NO: 9925 - protein, 15 aa, synthetic construct
PSPRALRAASVCPVA

SEQ ID NO: 9926 - protein, 15 aa, synthetic construct
PSPRPVSASPPRPPS

SEQ ID NO: 9927 - protein, 15 aa, synthetic construct
PSPRRPAPSPPAVRW

SEQ ID NO: 9928 - protein, 15 aa, synthetic construct
PSRAAPWPWWSCPGA

SEQ ID NO: 9929 - protein, 15 aa, synthetic construct
PSRGDCESLAEAVLR

SEQ ID NO: 9930 - protein, 15 aa, synthetic construct
PSRGRGEAAGLGLGL

SEQ ID NO: 9931 - protein, 15 aa, synthetic construct
PSRPPSPPSPRRRSG

SEQ ID NO: 9932 - protein, 15 aa, synthetic construct
PSSSAPCAPYAAPAA

SEQ ID NO: 9933 - protein, 15 aa, synthetic construct
PSSSLWPPTRSSWLS

SEQ ID NO: 9934 - protein, 15 aa, synthetic construct
PSSSPAPGPCPGLAP

SEQ ID NO: 9935 - protein, 15 aa, synthetic construct
PTAAAAAAAARAPPG

SEQ ID NO: 9936 - protein, 15 aa, synthetic construct
PTAAAPPTRSQGVPV

SEQ ID NO: 9937 - protein, 15 aa, synthetic construct
PTAARCPQPRSHARS

SEQ ID NO: 9938 - protein, 15 aa, synthetic construct
PTALPWLHSLCRCCG

SEQ ID NO: 9939 - protein, 15 aa, synthetic construct
PTALRPCLFTHGPSS

SEQ ID NO: 9940 - protein, 15 aa, synthetic construct
PTASRTQTPRRSASR

SEQ ID NO: 9941 - protein, 15 aa, synthetic construct
PTASTAPSSSWRRRW

SEQ ID NO: 9942 - protein, 15 aa, synthetic construct
PTASTSMSGSSCSSF

SEQ ID NO: 9943 - protein, 15 aa, synthetic construct
PTASWAAAGSRPPPP

SEQ ID NO: 9944 - protein, 15 aa, synthetic construct
PTATIPATLAEAAVA

SEQ ID NO: 9945 - protein, 15 aa, synthetic construct
PTAVPGCPSCWPASM

SEQ ID NO: 9946 - protein, 15 aa, synthetic construct
PTCCCWTPATSTRAL

SEQ ID NO: 9947 - protein, 15 aa, synthetic construct
PTCWPPASWPTCAAD

SEQ ID NO: 9948 - protein, 15 aa, synthetic construct
PTGPFCRRHPRLRAL

SEQ ID NO: 9949 - protein, 15 aa, synthetic construct
PTGSCCTGPIPFPAP

SEQ ID NO: 9950 - protein, 15 aa, synthetic construct
PTLQSWMAPPTCSFL

SEQ ID NO: 9951 - protein, 15 aa, synthetic construct
PTPEMSLPPPHRTCK

SEQ ID NO: 9952 - protein, 15 aa, synthetic construct
PTPRSWGRRLRWAPP

SEQ ID NO: 9953 - protein, 15 aa, synthetic construct
PTPSRRSALTSLPTC

SEQ ID NO: 9954 - protein, 15 aa, synthetic construct
PTPWAWSWHRSRCST

SEQ ID NO: 9955 - protein, 15 aa, synthetic construct
PTSAWSSTHPMCTCP

SEQ ID NO: 9956 - protein, 15 aa, synthetic construct
PTSTRQRGQSERSQD

SEQ ID NO: 9957 - protein, 15 aa, synthetic construct
PVAALWTRLAARAWS

SEQ ID NO: 9958 - protein, 15 aa, synthetic construct
PVAHVPAAAGELGPG

SEQ ID NO: 9959 - protein, 15 aa, synthetic construct
PVARAGAHTRTGPRS

SEQ ID NO: 9960 - protein, 15 aa, synthetic construct
PVARGAGGGPRARLR

SEQ ID NO: 9961 - protein, 15 aa, synthetic construct
PVGAAGGGGGADVPG

SEQ ID NO: 9962 - protein, 15 aa, synthetic construct
PVVPGAFRAAAGAAV

SEQ ID NO: 9963 - protein, 15 aa, synthetic construct
PWCSQRLRPAAPHSD

SEQ ID NO: 9964 - protein, 15 aa, synthetic construct
PWPPRTAPLLPAASC

SEQ ID NO: 9965 - protein, 15 aa, synthetic construct
QGALEQYRPRAVWQE

SEQ ID NO: 9966 - protein, 15 aa, synthetic construct
QSCGAPGPGPPPAAP

SEQ ID NO: 9967 - protein, 15 aa, synthetic construct
RGGPPPPGLPGCPGL

SEQ ID NO: 9968 - protein, 15 aa, synthetic construct
RGHRLSPPGAPRRPD

SEQ ID NO: 9969 - protein, 15 aa, synthetic construct
RLPPPAPVPCCCCFC

SEQ ID NO: 9970 - protein, 15 aa, synthetic construct
RPAPAAPAPPAPPAA

SEQ ID NO: 9971 - protein, 15 aa, synthetic construct
RPAPTAACPAPQAQA

SEQ ID NO: 9972 - protein, 15 aa, synthetic construct
RPGAPTGRARGAAPP

SEQ ID NO: 9973 - protein, 15 aa, synthetic construct
RPGAPWSCPSCGAAC

SEQ ID NO: 9974 - protein, 15 aa, synthetic construct
RPPPAAKSWGWLRPP

SEQ ID NO: 9975 - protein, 15 aa, synthetic construct
RPRPPAPTPSRGHPE

SEQ ID NO: 9976 - protein, 15 aa, synthetic construct
RPSAPAALPDRGERR

SEQ ID NO: 9977 - protein, 15 aa, synthetic construct
RQDRLRSRPGAPAGR

SEQ ID NO: 9978 - protein, 15 aa, synthetic construct
RRAAAQPLPPVPAAP

SEQ ID NO: 9979 - protein, 15 aa, synthetic construct
RRAAPSPEPAAPLRL

SEQ ID NO: 9980 - protein, 15 aa, synthetic construct
RRARPAAPAGLRGPH

SEQ ID NO: 9981 - protein, 15 aa, synthetic construct
RRAWQGPRPPPSPRT

SEQ ID NO: 9982 - protein, 15 aa, synthetic construct
RRGWPAPVPVPGAER

SEQ ID NO: 9983 - protein, 15 aa, synthetic construct
RRPAAPHGARGLPRP

SEQ ID NO: 9984 - protein, 15 aa, synthetic construct
RRRRRRRRRRKRRRL

SEQ ID NO: 9985 - protein, 15 aa, synthetic construct
RRSPSSRRSPPPAPA

SEQ ID NO: 9986 - protein, 15 aa, synthetic construct
RSRGGPGATPGAPSP

SEQ ID NO: 9987 - protein, 15 aa, synthetic construct
RTTRRPRPPASPPAR

SEQ ID NO: 9988 - protein, 15 aa, synthetic construct
SATTPAAPATARSVP

SEQ ID NO: 9989 - protein, 15 aa, synthetic construct
SPAAPSPDAVSLCAT

SEQ ID NO: 9990 - protein, 15 aa, synthetic construct
SPGAPSQTFSTPART

SEQ ID NO: 9991 - protein, 15 aa, synthetic construct
SPPGGIRRPSDCAPR

SEQ ID NO: 9992 - protein, 15 aa, synthetic construct
SPSTPRPPPGAPRAP

SEQ ID NO: 9993 - protein, 15 aa, synthetic construct
SRQGRSPPPSPRAPA

SEQ ID NO: 9994 - protein, 15 aa, synthetic construct
STSPLSRPSTTPGPC

SEQ ID NO: 9995 - protein, 15 aa, synthetic construct
SWFSACSWGPTKLRT

SEQ ID NO: 9996 - protein, 15 aa, synthetic construct
TPAPSAWRSITGPWP

SEQ ID NO: 9997 - protein, 15 aa, synthetic construct
TPPAAQVPNAPGPWR

SEQ ID NO: 9998 - protein, 15 aa, synthetic construct
VGARVVRPQVSRRWY

SEQ ID NO: 9999 - protein, 15 aa, synthetic construct
VPGAPRRGLSSMTRT

SEQ ID NO: 10000 - protein, 15 aa, synthetic construct
VRDRPPAPQGELRAQ

SEQ ID NO: 10001 - protein, 15 aa, synthetic construct
VRRLVPAPLPAWGAA

SEQ ID NO: 10002 - protein, 15 aa, synthetic construct
WKPPSPRVSSLAPPP

SEQ ID NO: 10003 - protein, 15 aa, synthetic construct
WLPAAPGPRCPHSWS

SEQ ID NO: 10004 - protein, 15 aa, synthetic construct
WLRRLGCSSGCSCSG

SEQ ID NO: 10005 - protein, 15 aa, synthetic construct
WPAAPAWLASAASAA

SEQ ID NO: 10006 - protein, 15 aa, synthetic construct
WPAAPNGCTAKRGPR

SEQ ID NO: 10007 - protein, 15 aa, synthetic construct
WPAPCRPASPRAGTA

SEQ ID NO: 10008 - protein, 15 aa, synthetic construct
WPAPRPCNSPSPSPQ

SEQ ID NO: 10009 - protein, 15 aa, synthetic construct
WPGAPGPRRPVAAAA

SEQ ID NO: 10010 - protein, 15 aa, synthetic construct
WPLWRPSAPPPPAVL

SEQ ID NO: 10011 - protein, 15 aa, synthetic construct
WPPSPSCGPSGQVGP

SEQ ID NO: 10012 - protein, 15 aa, synthetic construct
WPRPAAPPEPACCSS

SEQ ID NO: 10013 - protein, 15 aa, synthetic construct
WQRARCPCPPPAPSC

SEQ ID NO: 10014 - protein, 15 aa, synthetic construct
WQRPPAPRSFCASRF

SEQ ID NO: 10015 - protein, 15 aa, synthetic construct
WQRPPAPRSFRASRF

SEQ ID NO: 10016 - protein, 15 aa, synthetic construct
WQRPPAPRSFYASRF

SEQ ID NO: 10017 - protein, 15 aa, synthetic construct
WRIPPSPTGWRPRTA

SEQ ID NO: 10018 - protein, 15 aa, synthetic construct
WRPGAPSPTRRSPES

SEQ ID NO: 10019 - protein, 15 aa, synthetic construct
WRRPRPGAPGVAGSV

SEQ ID NO: 10020 - protein, 15 aa, synthetic construct
WRRQPPASPCSPPRR

SEQ ID NO: 10021 - protein, 15 aa, synthetic construct
WSTQPPQAPGLDLPL

SEQ ID NO: 10022 - protein, 15 aa, synthetic construct
WTGPPSPRSRACGTP

SEQ ID NO: 10023 - protein, 15 aa, synthetic construct
WTRWRRGPPPPSPTR

SEQ ID NO: 10024 - protein, 15 aa, synthetic construct
WVPTAPCLVDPGWGV

SEQ ID NO: 10025 - protein, 15 aa, synthetic construct
WWRRIWRDPTNQESG

SEQ ID NO: 10026 - protein, 15 aa, synthetic construct
WWRSGPRPAAPGAGC

SEQ ID NO: 10027 - protein, 15 aa, synthetic construct
AAAAAAAAAAAPAAA

SEQ ID NO: 10028 - protein, 15 aa, synthetic construct
AAAAAAAAAAASAAA

SEQ ID NO: 10029 - protein, 15 aa, synthetic construct
AAAAAAAAAAATGRE

SEQ ID NO: 10030 - protein, 15 aa, synthetic construct
AAAAAAAAAAPASCG

SEQ ID NO: 10031 - protein, 15 aa, synthetic construct
AAAAAAAAAARAAAG

SEQ ID NO: 10032 - protein, 15 aa, synthetic construct
AAAAAAAAARAAGPG

SEQ ID NO: 10033 - protein, 15 aa, synthetic construct
AAAAAAAATAAAGGG

SEQ ID NO: 10034 - protein, 15 aa, synthetic construct
AAAAAAAATAATAAA

SEQ ID NO: 10035 - protein, 15 aa, synthetic construct
AAAAAAAEGERPWMT

SEQ ID NO: 10036 - protein, 15 aa, synthetic construct
AAAAAAAPALGEGEG

SEQ ID NO: 10037 - protein, 15 aa, synthetic construct
AAAAAAGGACGLPEP

SEQ ID NO: 10038 - protein, 15 aa, synthetic construct
AAAAAAGGQRERRRT

SEQ ID NO: 10039 - protein, 15 aa, synthetic construct
AAAAAAPALGEGEGG

SEQ ID NO: 10040 - protein, 15 aa, synthetic construct
AAAAAARVGGDCGPG

SEQ ID NO: 10041 - protein, 15 aa, synthetic construct
AAAAAASASSSVFAE

SEQ ID NO: 10042 - protein, 15 aa, synthetic construct
AAAAAATSAARGALP

SEQ ID NO: 10043 - protein, 15 aa, synthetic construct
AAAAAAVPEPWDPRR

SEQ ID NO: 10044 - protein, 15 aa, synthetic construct
AAAAADTPERPGPAA

SEQ ID NO: 10045 - protein, 15 aa, synthetic construct
AAAAAEVPLPPLPLG

SEQ ID NO: 10046 - protein, 15 aa, synthetic construct
AAAAAGARGKDGGRG

SEQ ID NO: 10047 - protein, 15 aa, synthetic construct
AAAAAPAAAAPAAAS

SEQ ID NO: 10048 - protein, 15 aa, synthetic construct
AAAAAPAAREAALLV

SEQ ID NO: 10049 - protein, 15 aa, synthetic construct
AAAAAPALVPGRRAR

SEQ ID NO: 10050 - protein, 15 aa, synthetic construct
AAAAATAAGAAPGTA

SEQ ID NO: 10051 - protein, 15 aa, synthetic construct
AAAAATPASATPRSP

SEQ ID NO: 10052 - protein, 15 aa, synthetic construct
AAAADATAGPGDAAA

SEQ ID NO: 10053 - protein, 15 aa, synthetic construct
AAAAGPGPALEPLAG

SEQ ID NO: 10054 - protein, 15 aa, synthetic construct
AAAAGRMEALAPGAG

SEQ ID NO: 10055 - protein, 15 aa, synthetic construct
AAAAGTGSPRGPRHR

SEQ ID NO: 10056 - protein, 15 aa, synthetic construct
AAAAHSQRWPSCVAF

SEQ ID NO: 10057 - protein, 15 aa, synthetic construct
AAAALPGCDQALGPV

SEQ ID NO: 10058 - protein, 15 aa, synthetic construct
AAAAPAADCPLGRVP

SEQ ID NO: 10059 - protein, 15 aa, synthetic construct
AAAAPAPAPAPRGAS

SEQ ID NO: 10060 - protein, 15 aa, synthetic construct
AAAAPASARGRRAGP

SEQ ID NO: 10061 - protein, 15 aa, synthetic construct
AAAAPASGAAASAAG

SEQ ID NO: 10062 - protein, 15 aa, synthetic construct
AAAAPDHPAHRGQHL

SEQ ID NO: 10063 - protein, 15 aa, synthetic construct
AAAAPGEPEGSGQQG

SEQ ID NO: 10064 - protein, 15 aa, synthetic construct
AAAAPSAARGPGAGG

SEQ ID NO: 10065 - protein, 15 aa, synthetic construct
AAAARAAAGNGCAGR

SEQ ID NO: 10066 - protein, 15 aa, synthetic construct
AAAAREGAGGGASRC

SEQ ID NO: 10067 - protein, 15 aa, synthetic construct
AAAARPPARGPRVPR

SEQ ID NO: 10068 - protein, 15 aa, synthetic construct
AAAAVAAAAAAATIG

SEQ ID NO: 10069 - protein, 13 aa, synthetic construct
AAAAVAPLGRAAD

SEQ ID NO: 10070 - protein, 15 aa, synthetic construct
AAAAVSPRVAAESTE

SEQ ID NO: 10071 - protein, 15 aa, synthetic construct
AAAAVSVPRDGRLEA

SEQ ID NO: 10072 - protein, 15 aa, synthetic construct
AAACAPGVCGGGPAG

SEQ ID NO: 10073 - protein, 15 aa, synthetic construct
AAACVHPETAPQNQP

SEQ ID NO: 10074 - protein, 15 aa, synthetic construct
AAADGGVPGGGEYGR

SEQ ID NO: 10075 - protein, 15 aa, synthetic construct
AAADPAATPAAAALP

SEQ ID NO: 10076 - protein, 15 aa, synthetic construct
AAAEGGRGRPGGSRR

SEQ ID NO: 10077 - protein, 15 aa, synthetic construct
AAAEPPPARPGAVGP

SEQ ID NO: 10078 - protein, 15 aa, synthetic construct
AAAEVLPGWEPPLSP

SEQ ID NO: 10079 - protein, 15 aa, synthetic construct
AAAGAAADPRQPQPL

SEQ ID NO: 10080 - protein, 15 aa, synthetic construct
AAAGAEPGPAHDRLQ

SEQ ID NO: 10081 - protein, 15 aa, synthetic construct
AAAGAERGRAAPAPG

SEQ ID NO: 10082 - protein, 15 aa, synthetic construct
AAAGARADRGGCIDR

SEQ ID NO: 10083 - protein, 14 aa, synthetic construct
AAAGARAPGPAGPR

SEQ ID NO: 10084 - protein, 15 aa, synthetic construct
AAAGASRCLPSGPQT

SEQ ID NO: 10085 - protein, 15 aa, synthetic construct
AAAGEELVQRPKTAL

SEQ ID NO: 10086 - protein, 15 aa, synthetic construct
AAAGGAALGAGALRG

SEQ ID NO: 10087 - protein, 15 aa, synthetic construct
AAAGGFGAGVWAQPG

SEQ ID NO: 10088 - protein, 15 aa, synthetic construct
AAAGHHHRSEEGRHA

SEQ ID NO: 10089 - protein, 15 aa, synthetic construct
AAAGLRRGRRGRRRR

SEQ ID NO: 10090 - protein, 15 aa, synthetic construct
AAAGPERQPAGSTGT

SEQ ID NO: 10091 - protein, 15 aa, synthetic construct
AAAGPGGRRAVHTAR

SEQ ID NO: 10092 - protein, 15 aa, synthetic construct
AAAGPRTAAEPQEPC

SEQ ID NO: 10093 - protein, 15 aa, synthetic construct
AAAGRALALMSATLG

SEQ ID NO: 10094 - protein, 15 aa, synthetic construct
AAAGTDAAPGPAGCP

SEQ ID NO: 10095 - protein, 15 aa, synthetic construct
AAAGVQAQGLRCEPA

SEQ ID NO: 10096 - protein, 15 aa, synthetic construct
AAAHGFSSKAPGVAP

SEQ ID NO: 10097 - protein, 15 aa, synthetic construct
AAAHGGSGHQPQTGR

SEQ ID NO: 10098 - protein, 15 aa, synthetic construct
AAALAAEGAQLGRQG

SEQ ID NO: 10099 - protein, 15 aa, synthetic construct
AAALAVGDVALAAVC

SEQ ID NO: 10100 - protein, 15 aa, synthetic construct
AAALDAAGHRGASGT

SEQ ID NO: 10101 - protein, 15 aa, synthetic construct
AAALEACAAAAADAA

SEQ ID NO: 10102 - protein, 15 aa, synthetic construct
AAALPDAAARQGLPH

SEQ ID NO: 10103 - protein, 15 aa, synthetic construct
AAALSDQFSRCLSGL

SEQ ID NO: 10104 - protein, 15 aa, synthetic construct
AAAPAAAASPLADGR

SEQ ID NO: 10105 - protein, 15 aa, synthetic construct
AAAPAAPGRGHKRPS

SEQ ID NO: 10106 - protein, 15 aa, synthetic construct
AAAPAARPAPGLRDL

SEQ ID NO: 10107 - protein, 15 aa, synthetic construct
AAAPAEPGRTRGGPG

SEQ ID NO: 10108 - protein, 15 aa, synthetic construct
AAAPAVAVGALAAGA

SEQ ID NO: 10109 - protein, 15 aa, synthetic construct
AAAPAVPAAGDAEAV

SEQ ID NO: 10110 - protein, 15 aa, synthetic construct
AAAPGAPALPGAAAR

SEQ ID NO: 10111 - protein, 15 aa, synthetic construct
AAAPGGRPHGRQRGG

SEQ ID NO: 10112 - protein, 15 aa, synthetic construct
AAAPPAAAPAAARGC

SEQ ID NO: 10113 - protein, 15 aa, synthetic construct
AAAPPRRPPAAAAAV

SEQ ID NO: 10114 - protein, 15 aa, synthetic construct
AAAPQRAEAPSGNTQ

SEQ ID NO: 10115 - protein, 15 aa, synthetic construct
AAAPRGCTGRRSSSC

SEQ ID NO: 10116 - protein, 15 aa, synthetic construct
AAAPRRRLPRAGLLR

SEQ ID NO: 10117 - protein, 15 aa, synthetic construct
AAAPRTTAWEPHEAR

SEQ ID NO: 10118 - protein, 15 aa, synthetic construct
AAAPVSLQDAAGDLR

SEQ ID NO: 10119 - protein, 15 aa, synthetic construct
AAAQPPRDLGWGSGV

SEQ ID NO: 10120 - protein, 15 aa, synthetic construct
AAAQSEAAPETGDIY

SEQ ID NO: 10121 - protein, 15 aa, synthetic construct
AAARERQARRRRRPP

SEQ ID NO: 10122 - protein, 15 aa, synthetic construct
AAARGAGRGSGPVPG

SEQ ID NO: 10123 - protein, 15 aa, synthetic construct
AAARGLATSAPGGGG

SEQ ID NO: 10124 - protein, 15 aa, synthetic construct
AAARLGARAAARADA

SEQ ID NO: 10125 - protein, 15 aa, synthetic construct
AAARLPAGPRRRPRA

SEQ ID NO: 10126 - protein, 15 aa, synthetic construct
AAARPGRQEALQDRH

SEQ ID NO: 10127 - protein, 15 aa, synthetic construct
AAARTPPEAAHGPAA

SEQ ID NO: 10128 - protein, 15 aa, synthetic construct
AAARVAATALPVGQA

SEQ ID NO: 10129 - protein, 15 aa, synthetic construct
AAARVPEGGDPGLRA

SEQ ID NO: 10130 - protein, 15 aa, synthetic construct
AAASAPAAASPTLGR

SEQ ID NO: 10131 - protein, 15 aa, synthetic construct
AAASAPARPPPPDAT

SEQ ID NO: 10132 - protein, 15 aa, synthetic construct
AAASAPPPTEGCPAT

SEQ ID NO: 10133 - protein, 15 aa, synthetic construct
AAASEGGRAQGPAGA

SEQ ID NO: 10134 - protein, 15 aa, synthetic construct
AAASPAAASPAAVSP

SEQ ID NO: 10135 - protein, 15 aa, synthetic construct
AAASPAVPSPAAVSQ

SEQ ID NO: 10136 - protein, 15 aa, synthetic construct
AAASPCAPGCQPVPA

SEQ ID NO: 10137 - protein, 15 aa, synthetic construct
AAASRVGSGSNVAAV

SEQ ID NO: 10138 - protein, 15 aa, synthetic construct
AAASSPADRGGAGGR

SEQ ID NO: 10139 - protein, 15 aa, synthetic construct
AAASVSAAAAAAPAA

SEQ ID NO: 10140 - protein, 15 aa, synthetic construct
AAATAAAAAGLNRSP

SEQ ID NO: 10141 - protein, 15 aa, synthetic construct
AAATAAASSVWRASC

SEQ ID NO: 10142 - protein, 15 aa, synthetic construct
AAATAEPAGAPAAAA

SEQ ID NO: 10143 - protein, 15 aa, synthetic construct
AAATELGPLARDACP

SEQ ID NO: 10144 - protein, 15 aa, synthetic construct
AAATLRHVEGLLQPE

SEQ ID NO: 10145 - protein, 15 aa, synthetic construct
AAAVAAAAAARPGVG

SEQ ID NO: 10146 - protein, 15 aa, synthetic construct
AAAVAATAGGLGPSL

SEQ ID NO: 10147 - protein, 15 aa, synthetic construct
AAAVPELDAGRAHAA

SEQ ID NO: 10148 - protein, 15 aa, synthetic construct
AADAAAPAGTAGAAS

SEQ ID NO: 10149 - protein, 15 aa, synthetic construct
AADCAARRAEVAESR

SEQ ID NO: 10150 - protein, 15 aa, synthetic construct
AADGAPGPAGGGGDA

SEQ ID NO: 10151 - protein, 15 aa, synthetic construct
AADGEGAAGPRVQPA

SEQ ID NO: 10152 - protein, 15 aa, synthetic construct
AADPEPEGCAAGGQR

SEQ ID NO: 10153 - protein, 15 aa, synthetic construct
AADRAARLPAARRPT

SEQ ID NO: 10154 - protein, 15 aa, synthetic construct
AADRCGGRPERRQEL

SEQ ID NO: 10155 - protein, 15 aa, synthetic construct
AADRCSGRPERRQEL

SEQ ID NO: 10156 - protein, 15 aa, synthetic construct
AADRGRGSEARAQPR

SEQ ID NO: 10157 - protein, 15 aa, synthetic construct
AADRRGGRPERRQEL

SEQ ID NO: 10158 - protein, 15 aa, synthetic construct
AADSAVSGPAGPELS

SEQ ID NO: 10159 - protein, 15 aa, synthetic construct
AADSFQQKEDVCSQI

SEQ ID NO: 10160 - protein, 15 aa, synthetic construct
AADWCRARQNEQEER

SEQ ID NO: 10161 - protein, 15 aa, synthetic construct
AAEAGEGAAAEDLPG

SEQ ID NO: 10162 - protein, 15 aa, synthetic construct
AAEDKPRITPSAAGC

SEQ ID NO: 10163 - protein, 15 aa, synthetic construct
AAEEPRTTSGLRACA

SEQ ID NO: 10164 - protein, 15 aa, synthetic construct
AAEGAGGAAGRGSAA

SEQ ID NO: 10165 - protein, 15 aa, synthetic construct
AAELARPWGSAGGRR

SEQ ID NO: 10166 - protein, 15 aa, synthetic construct
AAELGSRQGRRPATA

SEQ ID NO: 10167 - protein, 15 aa, synthetic construct
AAELVPTYVRPCCRG

SEQ ID NO: 10168 - protein, 14 aa, synthetic construct
AAENSARSVRSPVP

SEQ ID NO: 10169 - protein, 15 aa, synthetic construct
AAEPLTSLPAPSPRL

SEQ ID NO: 10170 - protein, 15 aa, synthetic construct
AAEPRLPEAAALRPS

SEQ ID NO: 10171 - protein, 15 aa, synthetic construct
AAEQRLGRRAGAGAP

SEQ ID NO: 10172 - protein, 15 aa, synthetic construct
AAERAAAHRGQGPRG

SEQ ID NO: 10173 - protein, 15 aa, synthetic construct
AAERGGPRPFRQLSG

SEQ ID NO: 10174 - protein, 15 aa, synthetic construct
AAESGGGRADREPRR

SEQ ID NO: 10175 - protein, 15 aa, synthetic construct
AAESGLPRAAAAAAA

SEQ ID NO: 10176 - protein, 15 aa, synthetic construct
AAESGPGAAGPAGRG

SEQ ID NO: 10177 - protein, 15 aa, synthetic construct
AAEVGPRGHDVAWSP

SEQ ID NO: 10178 - protein, 15 aa, synthetic construct
AAFCCCSRPGTRAPR

SEQ ID NO: 10179 - protein, 15 aa, synthetic construct
AAGAAAPRAAARAPS

SEQ ID NO: 10180 - protein, 15 aa, synthetic construct
AAGAAATTAASLVPL

SEQ ID NO: 10181 - protein, 15 aa, synthetic construct
AAGAAEAVPARGGGA

SEQ ID NO: 10182 - protein, 15 aa, synthetic construct
AAGAAPAGAVAPAWY

SEQ ID NO: 10183 - protein, 15 aa, synthetic construct
AAGAARRPAGAGGGG

SEQ ID NO: 10184 - protein, 15 aa, synthetic construct
AAGAEETNETGPENR

SEQ ID NO: 10185 - protein, 15 aa, synthetic construct
AAGAGAQAGEAERAA

SEQ ID NO: 10186 - protein, 15 aa, synthetic construct
AAGAGELSGWLGVQS

SEQ ID NO: 10187 - protein, 15 aa, synthetic construct
AAGAGGRGDPRGRLQ

SEQ ID NO: 10188 - protein, 15 aa, synthetic construct
AAGAGRLPPELPLPQ

SEQ ID NO: 10189 - protein, 15 aa, synthetic construct
AAGALPFSFYHALQE

SEQ ID NO: 10190 - protein, 15 aa, synthetic construct
AAGAPASELHPGAAL

SEQ ID NO: 10191 - protein, 15 aa, synthetic construct
AAGARAAAEERVLRG

SEQ ID NO: 10192 - protein, 15 aa, synthetic construct
AAGAREPGLRVWRGP

SEQ ID NO: 10193 - protein, 15 aa, synthetic construct
AAGCAAAATPPKLMV

SEQ ID NO: 10194 - protein, 15 aa, synthetic construct
AAGDTGRAVRGAGAG

SEQ ID NO: 10195 - protein, 15 aa, synthetic construct
AAGEPGGGGSAQEPR

SEQ ID NO: 10196 - protein, 15 aa, synthetic construct
AAGGAHAPLEPECSR

SEQ ID NO: 10197 - protein, 15 aa, synthetic construct
AAGGGAWRGAAPGVR

SEQ ID NO: 10198 - protein, 15 aa, synthetic construct
AAGGGQGVDHGRGRG

SEQ ID NO: 10199 - protein, 15 aa, synthetic construct
AAGGHAGRAGGAGVP

SEQ ID NO: 10200 - protein, 15 aa, synthetic construct
AAGGRGAAVRPRGTP

SEQ ID NO: 10201 - protein, 15 aa, synthetic construct
AAGGRPALGIQGGQS

SEQ ID NO: 10202 - protein, 15 aa, synthetic construct
AAGHRGAQGGGEVAV

SEQ ID NO: 10203 - protein, 15 aa, synthetic construct
AAGLGPSPWPDGSVG

SEQ ID NO: 10204 - protein, 15 aa, synthetic construct
AAGLPAGPRLQAGRG

SEQ ID NO: 10205 - protein, 15 aa, synthetic construct
AAGLPSLEGAAARAQ

SEQ ID NO: 10206 - protein, 15 aa, synthetic construct
AAGNGARARPSEARG

SEQ ID NO: 10207 - protein, 15 aa, synthetic construct
AAGPAPLRGLRLGAR

SEQ ID NO: 10208 - protein, 15 aa, synthetic construct
AAGPEDRGVGAAAAV

SEQ ID NO: 10209 - protein, 15 aa, synthetic construct
AAGPGLARPQGGSGA

SEQ ID NO: 10210 - protein, 15 aa, synthetic construct
AAGPPPEAQGEQGAR

SEQ ID NO: 10211 - protein, 15 aa, synthetic construct
AAGPTRTTMARMGMK

SEQ ID NO: 10212 - protein, 15 aa, synthetic construct
AAGQADRVSEARGEM

SEQ ID NO: 10213 - protein, 15 aa, synthetic construct
AAGQGPPETVPREPP

SEQ ID NO: 10214 - protein, 15 aa, synthetic construct
AAGQQLGAPAQQELP

SEQ ID NO: 10215 - protein, 15 aa, synthetic construct
AAGQRELGEPHPRLA

SEQ ID NO: 10216 - protein, 15 aa, synthetic construct
AAGQTLEAAQRQRQD

SEQ ID NO: 10217 - protein, 15 aa, synthetic construct
AAGRAGAAAGGGRLG

SEQ ID NO: 10218 - protein, 15 aa, synthetic construct
AAGRPRARDTLFEVR

SEQ ID NO: 10219 - protein, 15 aa, synthetic construct
AAGRRVPDTAERAGE

SEQ ID NO: 10220 - protein, 15 aa, synthetic construct
AAGRVGGLGPPGARP

SEQ ID NO: 10221 - protein, 15 aa, synthetic construct
AAGTGGSVEQGRGGV

SEQ ID NO: 10222 - protein, 15 aa, synthetic construct
AAGVAGAGGPGARGG

SEQ ID NO: 10223 - protein, 15 aa, synthetic construct
AAGVHRPPELPGPGA

SEQ ID NO: 10224 - protein, 15 aa, synthetic construct
AAGVPEPAGLDPLVH

SEQ ID NO: 10225 - protein, 15 aa, synthetic construct
AAGVRAALLDAEQSP

SEQ ID NO: 10226 - protein, 15 aa, synthetic construct
AAHARPGDGAAGPRA

SEQ ID NO: 10227 - protein, 15 aa, synthetic construct
AAHERLHGLGQGREE

SEQ ID NO: 10228 - protein, 15 aa, synthetic construct
AAHERLHGVGAGGAQ

SEQ ID NO: 10229 - protein, 15 aa, synthetic construct
AAHLRLRHAAQHGLP

SEQ ID NO: 10230 - protein, 15 aa, synthetic construct
AAIEELCGRQAARAE

SEQ ID NO: 10231 - protein, 15 aa, synthetic construct
AAIPPPVGLSSDPWG

SEQ ID NO: 10232 - protein, 15 aa, synthetic construct
AAKGAISSASRSKST

SEQ ID NO: 10233 - protein, 15 aa, synthetic construct
AAKGTAEGPTGENRA

SEQ ID NO: 10234 - protein, 15 aa, synthetic construct
AAKRPCGLAARGAAV

SEQ ID NO: 10235 - protein, 15 aa, synthetic construct
AALAGTGAGALRLPR

SEQ ID NO: 10236 - protein, 15 aa, synthetic construct
AALDAAPLLRLPTAR

SEQ ID NO: 10237 - protein, 15 aa, synthetic construct
AALDLPHGVQAQSPG

SEQ ID NO: 10238 - protein, 15 aa, synthetic construct
AALGDRAGSARGGPG

SEQ ID NO: 10239 - protein, 15 aa, synthetic construct
AALGFQRESSNPRRC

SEQ ID NO: 10240 - protein, 15 aa, synthetic construct
AALPGPRAAVGDPTE

SEQ ID NO: 10241 - protein, 15 aa, synthetic construct
AALPLAAGPGPRGAP

SEQ ID NO: 10242 - protein, 15 aa, synthetic construct
AALPRPASPDGAVRV

SEQ ID NO: 10243 - protein, 15 aa, synthetic construct
AALQEGAGRQPGAGP

SEQ ID NO: 10244 - protein, 15 aa, synthetic construct
AALRAAAAAAAATAA

SEQ ID NO: 10245 - protein, 15 aa, synthetic construct
AALRGPGERRGEDGG

SEQ ID NO: 10246 - protein, 15 aa, synthetic construct
AALTAAPRQVRGARG

SEQ ID NO: 10247 - protein, 15 aa, synthetic construct
AALTAPAPVPAVAPQ

SEQ ID NO: 10248 - protein, 15 aa, synthetic construct
AALVAEPGARSRRPR

SEQ ID NO: 10249 - protein, 15 aa, synthetic construct
AAMVRAEQRAPELLQ

SEQ ID NO: 10250 - protein, 15 aa, synthetic construct
AANRELPPQVARRTG

SEQ ID NO: 10251 - protein, 15 aa, synthetic construct
AAPAAAAAGGHSGAA

SEQ ID NO: 10252 - protein, 15 aa, synthetic construct
AAPAAAAAPYSPGRR

SEQ ID NO: 10253 - protein, 15 aa, synthetic construct
AAPAAAAGGHRGEAL

SEQ ID NO: 10254 - protein, 15 aa, synthetic construct
AAPAAAAPAASRRAP

SEQ ID NO: 10255 - protein, 15 aa, synthetic construct
AAPAAAGAALHAAGG

SEQ ID NO: 10256 - protein, 15 aa, synthetic construct
AAPAAARPPAAGPPA

SEQ ID NO: 10257 - protein, 15 aa, synthetic construct
AAPAAARRALPGGSP

SEQ ID NO: 10258 - protein, 15 aa, synthetic construct
AAPAAAWGSRGIRGS

SEQ ID NO: 10259 - protein, 15 aa, synthetic construct
AAPAAERPRRGTPSS

SEQ ID NO: 10260 - protein, 15 aa, synthetic construct
AAPAALVHLAAAQAG

SEQ ID NO: 10261 - protein, 15 aa, synthetic construct
AAPAARPGGVRGALR

SEQ ID NO: 10262 - protein, 15 aa, synthetic construct
AAPAATGPAGLAAAG

SEQ ID NO: 10263 - protein, 15 aa, synthetic construct
AAPAPAPAAGEAAAD

SEQ ID NO: 10264 - protein, 15 aa, synthetic construct
AAPAPQAAPARAPRA

SEQ ID NO: 10265 - protein, 15 aa, synthetic construct
AAPAPTPRAPADCSS

SEQ ID NO: 10266 - protein, 15 aa, synthetic construct
AAPAQPSVLGGDCPF

SEQ ID NO: 10267 - protein, 15 aa, synthetic construct
AAPARRAPGRRLPAA

SEQ ID NO: 10268 - protein, 15 aa, synthetic construct
AAPARYGASRENRRR

SEQ ID NO: 10269 - protein, 15 aa, synthetic construct
AAPASSPRSAPAGQP

SEQ ID NO: 10270 - protein, 15 aa, synthetic construct
AAPATAAAPAASALP

SEQ ID NO: 10271 - protein, 15 aa, synthetic construct
AAPCAPASCATAASS

SEQ ID NO: 10272 - protein, 15 aa, synthetic construct
AAPCARPSSGRERRQ

SEQ ID NO: 10273 - protein, 15 aa, synthetic construct
AAPDATSAAAAALPA

SEQ ID NO: 10274 - protein, 15 aa, synthetic construct
AAPDTAPSPNPTLLP

SEQ ID NO: 10275 - protein, 15 aa, synthetic construct
AAPEGALGTGRGRAL

SEQ ID NO: 10276 - protein, 15 aa, synthetic construct
AAPGALPEAAVGPRG

SEQ ID NO: 10277 - protein, 15 aa, synthetic construct
AAPGPPPVAGPAGDG

SEQ ID NO: 10278 - protein, 15 aa, synthetic construct
AAPGPSRRPSRRPRL

SEQ ID NO: 10279 - protein, 15 aa, synthetic construct
AAPGQPEPQLPAQRH

SEQ ID NO: 10280 - protein, 15 aa, synthetic construct
AAPGQQWPRHGADGC

SEQ ID NO: 10281 - protein, 15 aa, synthetic construct
AAPGRPGARRPRVLA

SEQ ID NO: 10282 - protein, 15 aa, synthetic construct
AAPGRPRRAHEPVFG

SEQ ID NO: 10283 - protein, 15 aa, synthetic construct
AAPGRPVRHAGRQRR

SEQ ID NO: 10284 - protein, 15 aa, synthetic construct
AAPGSPRRPHRAPRP

SEQ ID NO: 10285 - protein, 15 aa, synthetic construct
AAPGTRSWAASSGTG

SEQ ID NO: 10286 - protein, 15 aa, synthetic construct
AAPLAAAALPAARLR

SEQ ID NO: 10287 - protein, 15 aa, synthetic construct
AAPLACSWGCVAHPI

SEQ ID NO: 10288 - protein, 15 aa, synthetic construct
AAPLRTQHEGAPCRR

SEQ ID NO: 10289 - protein, 15 aa, synthetic construct
AAPLRVLLRRGGKRG

SEQ ID NO: 10290 - protein, 15 aa, synthetic construct
AAPPAGDAAGRARPA

SEQ ID NO: 10291 - protein, 15 aa, synthetic construct
AAPPRCHPGHPDPQP

SEQ ID NO: 10292 - protein, 15 aa, synthetic construct
AAPPRPGARCAAAAR

SEQ ID NO: 10293 - protein, 15 aa, synthetic construct
AAPQAARASQAADAR

SEQ ID NO: 10294 - protein, 15 aa, synthetic construct
AAPQDQDAAQEGQVL

SEQ ID NO: 10295 - protein, 15 aa, synthetic construct
AAPQEAAERWSRPRA

SEQ ID NO: 10296 - protein, 15 aa, synthetic construct
AAPQRPRGRLPQQLR

SEQ ID NO: 10297 - protein, 15 aa, synthetic construct
AAPQVPAGARAGLAR

SEQ ID NO: 10298 - protein, 15 aa, synthetic construct
AAPRAAHLPAPATSR

SEQ ID NO: 10299 - protein, 15 aa, synthetic construct
AAPRALQHPLRAGLG

SEQ ID NO: 10300 - protein, 15 aa, synthetic construct
AAPRAPAPAAAQSFA

SEQ ID NO: 10301 - protein, 15 aa, synthetic construct
AAPREPAARLPLRAR

SEQ ID NO: 10302 - protein, 15 aa, synthetic construct
AAPRPLGHRGRLLQL

SEQ ID NO: 10303 - protein, 15 aa, synthetic construct
AAPRSAVPGRGRPGA

SEQ ID NO: 10304 - protein, 15 aa, synthetic construct
AAPSAAAISPAAAPQ

SEQ ID NO: 10305 - protein, 15 aa, synthetic construct
AAPSAPLSQCGQWHQ

SEQ ID NO: 10306 - protein, 15 aa, synthetic construct
AAPSAWSTTAGAASS

SEQ ID NO: 10307 - protein, 15 aa, synthetic construct
AAPSRAPAARPPPPA

SEQ ID NO: 10308 - protein, 15 aa, synthetic construct
AAPSRLEAGGSGGDS

SEQ ID NO: 10309 - protein, 15 aa, synthetic construct
AAPTASPSPRPWPPR

SEQ ID NO: 10310 - protein, 15 aa, synthetic construct
AAPTGPQADPALPTR

SEQ ID NO: 10311 - protein, 15 aa, synthetic construct
AAPTGPVSRLPAGTH

SEQ ID NO: 10312 - protein, 15 aa, synthetic construct
AAPTRSPRAWMSLRP

SEQ ID NO: 10313 - protein, 15 aa, synthetic construct
AAPVALLGTLGVAPG

SEQ ID NO: 10314 - protein, 15 aa, synthetic construct
AAPVSALPGDRRRRA

SEQ ID NO: 10315 - protein, 15 aa, synthetic construct
AAPVSPDLNLLPGRN

SEQ ID NO: 10316 - protein, 15 aa, synthetic construct
AAPWDCDPLDSAPGS

SEQ ID NO: 10317 - protein, 15 aa, synthetic construct
AAQAAGHQGGSQERS

SEQ ID NO: 10318 - protein, 15 aa, synthetic construct
AAQAAGPSRTPSSTS

SEQ ID NO: 10319 - protein, 15 aa, synthetic construct
AAQAPELQQPQSATT

SEQ ID NO: 10320 - protein, 15 aa, synthetic construct
AAQDQQPRAEAHAGP

SEQ ID NO: 10321 - protein, 15 aa, synthetic construct
AAQLHPDFGGAAVRR

SEQ ID NO: 10322 - protein, 15 aa, synthetic construct
AAQPAGQRGALPALG

SEQ ID NO: 10323 - protein, 15 aa, synthetic construct
AAQPLPRLHRPQGHQ

SEQ ID NO: 10324 - protein, 15 aa, synthetic construct
AAQRPARRPAPAARE

SEQ ID NO: 10325 - protein, 15 aa, synthetic construct
AAQRRGPRPHAREDC

SEQ ID NO: 10326 - protein, 15 aa, synthetic construct
AAQSPAVQLPVGPEE

SEQ ID NO: 10327 - protein, 15 aa, synthetic construct
AAQYEEAAAPAPGRP

SEQ ID NO: 10328 - protein, 15 aa, synthetic construct
AARAAAAASSSRGRS

SEQ ID NO: 10329 - protein, 15 aa, synthetic construct
AARAAGRDHRPVPGG

SEQ ID NO: 10330 - protein, 15 aa, synthetic construct
AARADRAAAVREPRG

SEQ ID NO: 10331 - protein, 15 aa, synthetic construct
AARAEGPVPGRDAGD

SEQ ID NO: 10332 - protein, 15 aa, synthetic construct
AARAGAGIRVVRAGA

SEQ ID NO: 10333 - protein, 15 aa, synthetic construct
AARAGLGRGRRLGPG

SEQ ID NO: 10334 - protein, 15 aa, synthetic construct
AARALRAAAARAGCC

SEQ ID NO: 10335 - protein, 15 aa, synthetic construct
AARALRPPAHAPLAA

SEQ ID NO: 10336 - protein, 15 aa, synthetic construct
AARAPRAAHPAVLSA

SEQ ID NO: 10337 - protein, 15 aa, synthetic construct
AARAQQHRRAQEPRQ

SEQ ID NO: 10338 - protein, 15 aa, synthetic construct
AARCPAPCSCCSPTW

SEQ ID NO: 10339 - protein, 15 aa, synthetic construct
AARCQPRRRLGAVPR

SEQ ID NO: 10340 - protein, 15 aa, synthetic construct
AARCRAPPGARALSA

SEQ ID NO: 10341 - protein, 15 aa, synthetic construct
AARFPSGGGESAAGR

SEQ ID NO: 10342 - protein, 15 aa, synthetic construct
AARGGAGRARGGERG

SEQ ID NO: 10343 - protein, 15 aa, synthetic construct
AARGGGARGGRAAGR

SEQ ID NO: 10344 - protein, 15 aa, synthetic construct
AARGRATSCGTAAGC

SEQ ID NO: 10345 - protein, 15 aa, synthetic construct
AARGRGGRGEELRQA

SEQ ID NO: 10346 - protein, 15 aa, synthetic construct
AARGTPPQSPLGDEP

SEQ ID NO: 10347 - protein, 15 aa, synthetic construct
AARLARAPRAARLGP

SEQ ID NO: 10348 - protein, 15 aa, synthetic construct
AARLEDGSVWGAAVL

SEQ ID NO: 10349 - protein, 15 aa, synthetic construct
AARLGSGGVGKGAGQ

SEQ ID NO: 10350 - protein, 15 aa, synthetic construct
AARLHRTPELQRPGE

SEQ ID NO: 10351 - protein, 15 aa, synthetic construct
AARLPAGAHRRPAAA

SEQ ID NO: 10352 - protein, 15 aa, synthetic construct
AARLPSPSSPTSRWT

SEQ ID NO: 10353 - protein, 15 aa, synthetic construct
AARPALAWRRCRLLR

SEQ ID NO: 10354 - protein, 15 aa, synthetic construct
AARPFGREEEPPLEK

SEQ ID NO: 10355 - protein, 15 aa, synthetic construct
AARPGPGRRRARRVR

SEQ ID NO: 10356 - protein, 15 aa, synthetic construct
AARPPAAVTWAASAD

SEQ ID NO: 10357 - protein, 15 aa, synthetic construct
AARPRARPGERQARA

SEQ ID NO: 10358 - protein, 15 aa, synthetic construct
AARPRPARSCAATSW

SEQ ID NO: 10359 - protein, 15 aa, synthetic construct
AARPWGLRGPETRGV

SEQ ID NO: 10360 - protein, 15 aa, synthetic construct
AARQSAAAGPEDEGG

SEQ ID NO: 10361 - protein, 15 aa, synthetic construct
AARRAPGPEPAPARA

SEQ ID NO: 10362 - protein, 15 aa, synthetic construct
AARRARPEKQVRERG

SEQ ID NO: 10363 - protein, 15 aa, synthetic construct
AARRARPPGAGPGPG

SEQ ID NO: 10364 - protein, 15 aa, synthetic construct
AARRHGPGARRPGPA

SEQ ID NO: 10365 - protein, 15 aa, synthetic construct
AARRRAGPVPRGEGH

SEQ ID NO: 10366 - protein, 15 aa, synthetic construct
AARRRLGAAGGRGPG

SEQ ID NO: 10367 - protein, 15 aa, synthetic construct
AARRRRGGRPHRYAV

SEQ ID NO: 10368 - protein, 15 aa, synthetic construct
AARRRRPRPGPRPRP

SEQ ID NO: 10369 - protein, 15 aa, synthetic construct
AARRSRRAPWRAELA

SEQ ID NO: 10370 - protein, 15 aa, synthetic construct
AARSPTVQAAEPFPS

SEQ ID NO: 10371 - protein, 15 aa, synthetic construct
AARTARRSTASQSWT

SEQ ID NO: 10372 - protein, 15 aa, synthetic construct
AARTGGSAARQSPPS

SEQ ID NO: 10373 - protein, 15 aa, synthetic construct
AARVAGPGSSTRRGA

SEQ ID NO: 10374 - protein, 15 aa, synthetic construct
AARVDPAHLGLGGLR

SEQ ID NO: 10375 - protein, 15 aa, synthetic construct
AASAAAAAAAAVVSH

SEQ ID NO: 10376 - protein, 15 aa, synthetic construct
AASAAAIRGRGRETP

SEQ ID NO: 10377 - protein, 15 aa, synthetic construct
AASAALRAPCAGLLR

SEQ ID NO: 10378 - protein, 15 aa, synthetic construct
AASAAPGDACGLLGP

SEQ ID NO: 10379 - protein, 15 aa, synthetic construct
AASAEGPVPGRDAGD

SEQ ID NO: 10380 - protein, 15 aa, synthetic construct
AASALERAAAAPRAR

SEQ ID NO: 10381 - protein, 15 aa, synthetic construct
AASFTAFPLGAGTER

SEQ ID NO: 10382 - protein, 15 aa, synthetic construct
AASGCSRADLDAEKP

SEQ ID NO: 10383 - protein, 15 aa, synthetic construct
AASGGGHRRGGGRGH

SEQ ID NO: 10384 - protein, 13 aa, synthetic construct
AASGPAMGLPAAP

SEQ ID NO: 10385 - protein, 15 aa, synthetic construct
AASGSAAATRPTPRR

SEQ ID NO: 10386 - protein, 15 aa, synthetic construct
AASHAGPVVPASALG

SEQ ID NO: 10387 - protein, 15 aa, synthetic construct
AASLLEALRPDRLVP

SEQ ID NO: 10388 - protein, 15 aa, synthetic construct
AASLPPAAELAEQQD

SEQ ID NO: 10389 - protein, 12 aa, synthetic construct
AASPDHLSPACH

SEQ ID NO: 10390 - protein, 15 aa, synthetic construct
AASPGGAPAPGRPLL

SEQ ID NO: 10391 - protein, 15 aa, synthetic construct
AASRDLPWPGASPGC

SEQ ID NO: 10392 - protein, 15 aa, synthetic construct
AASRFRAALQASPLR

SEQ ID NO: 10393 - protein, 15 aa, synthetic construct
AASRPPPAGRAAGAA

SEQ ID NO: 10394 - protein, 15 aa, synthetic construct
AASSARQGAWEPGPR

SEQ ID NO: 10395 - protein, 15 aa, synthetic construct
AASSAVRLTPAANAP

SEQ ID NO: 10396 - protein, 15 aa, synthetic construct
AASSRPRVGTGCWGW

SEQ ID NO: 10397 - protein, 15 aa, synthetic construct
AASSSPPAALSLVLQ

SEQ ID NO: 10398 - protein, 15 aa, synthetic construct
AASSSTTQPCCCCPA

SEQ ID NO: 10399 - protein, 15 aa, synthetic construct
AASSTLSTGEAEAEK

SEQ ID NO: 10400 - protein, 15 aa, synthetic construct
AASTENPKRQTLQAE

SEQ ID NO: 10401 - protein, 15 aa, synthetic construct
AASVDSSEAHSATDK

SEQ ID NO: 10402 - protein, 15 aa, synthetic construct
AASVRSEALDPDLQV

SEQ ID NO: 10403 - protein, 15 aa, synthetic construct
AASVSRGSHWLREGQ

SEQ ID NO: 10404 - protein, 15 aa, synthetic construct
AASWQLHHDQAHLSH

SEQ ID NO: 10405 - protein, 15 aa, synthetic construct
AATAAAAAGTPRAGG

SEQ ID NO: 10406 - protein, 15 aa, synthetic construct
AATAATPPAATATAT

SEQ ID NO: 10407 - protein, 15 aa, synthetic construct
AATASPSAAHLPAAR

SEQ ID NO: 10408 - protein, 15 aa, synthetic construct
AATEFSAPNSSLPWS

SEQ ID NO: 10409 - protein, 15 aa, synthetic construct
AATGHGVEEEPDRGQ

SEQ ID NO: 10410 - protein, 15 aa, synthetic construct
AATGTGEGTGTGTRR

SEQ ID NO: 10411 - protein, 15 aa, synthetic construct
AATPAGPAGRALRQP

SEQ ID NO: 10412 - protein, 15 aa, synthetic construct
AATPDRPRPSLAGSG

SEQ ID NO: 10413 - protein, 15 aa, synthetic construct
AATPPTPSATTTPPT

SEQ ID NO: 10414 - protein, 15 aa, synthetic construct
AATPRPGPAPAAAPA

SEQ ID NO: 10415 - protein, 15 aa, synthetic construct
AATPRRGPQGHGRGH

SEQ ID NO: 10416 - protein, 15 aa, synthetic construct
AATRIGIAPAPAPAR

SEQ ID NO: 10417 - protein, 15 aa, synthetic construct
AATRPGPAASPRAPG

SEQ ID NO: 10418 - protein, 15 aa, synthetic construct
AATVRALECRAGQAG

SEQ ID NO: 10419 - protein, 15 aa, synthetic construct
AATVRGGALGPSGGG

SEQ ID NO: 10420 - protein, 15 aa, synthetic construct
AAVEEAQVRAAGRGA

SEQ ID NO: 10421 - protein, 15 aa, synthetic construct
AAVGAPRPPLDAQGL

SEQ ID NO: 10422 - protein, 15 aa, synthetic construct
AAVGRRPRAHLGRAR

SEQ ID NO: 10423 - protein, 15 aa, synthetic construct
AAVPAAAAPQRAGAP

SEQ ID NO: 10424 - protein, 15 aa, synthetic construct
AAVPAAHRAGAVGAR

SEQ ID NO: 10425 - protein, 15 aa, synthetic construct
AAVPAPDLWPPLHAA

SEQ ID NO: 10426 - protein, 15 aa, synthetic construct
AAVPDLGGVQPRCRE

SEQ ID NO: 10427 - protein, 15 aa, synthetic construct
AAVPHLPVAGVAGGR

SEQ ID NO: 10428 - protein, 15 aa, synthetic construct
AAVPVAAEAAGAQAD

SEQ ID NO: 10429 - protein, 15 aa, synthetic construct
AAVQVPEDRDPGLPV

SEQ ID NO: 10430 - protein, 15 aa, synthetic construct
AAVRASGLLGVSWTW

SEQ ID NO: 10431 - protein, 15 aa, synthetic construct
AAVREALGRQSKLSQ

SEQ ID NO: 10432 - protein, 15 aa, synthetic construct
AAVRPVRSPRRRRRR

SEQ ID NO: 10433 - protein, 15 aa, synthetic construct
AAVRRGSQGAWGHGG

SEQ ID NO: 10434 - protein, 15 aa, synthetic construct
AAVRRRGPRASPPPP

SEQ ID NO: 10435 - protein, 15 aa, synthetic construct
AAVSDADPTAESAAA

SEQ ID NO: 10436 - protein, 15 aa, synthetic construct
AAVSGGRAGPGLWGR

SEQ ID NO: 10437 - protein, 15 aa, synthetic construct
AAVSPCAASVRSEAL

SEQ ID NO: 10438 - protein, 15 aa, synthetic construct
AAWAGEAARTAPDSS

SEQ ID NO: 10439 - protein, 15 aa, synthetic construct
AAWKPKPHLPHGPSG

SEQ ID NO: 10440 - protein, 15 aa, synthetic construct
AAWRPASASLTSEGP

SEQ ID NO: 10441 - protein, 15 aa, synthetic construct
AAYRSAPASPVHNRH

SEQ ID NO: 10442 - protein, 15 aa, synthetic construct
ACAPAPPRAAGDWLC

SEQ ID NO: 10443 - protein, 14 aa, synthetic construct
ACARFDSSILQEEA

SEQ ID NO: 10444 - protein, 15 aa, synthetic construct
ACECHPGGPASPEPE

SEQ ID NO: 10445 - protein, 15 aa, synthetic construct
ACEPVPTVPAALSPS

SEQ ID NO: 10446 - protein, 15 aa, synthetic construct
ACGCREAWPPPGPPP

SEQ ID NO: 10447 - protein, 15 aa, synthetic construct
ACGRGSSERDIAPKH

SEQ ID NO: 10448 - protein, 15 aa, synthetic construct
ACGRLGAAAPALAPR

SEQ ID NO: 10449 - protein, 15 aa, synthetic construct
ACGSAPPPAGSPPTR

SEQ ID NO: 10450 - protein, 15 aa, synthetic construct
ACHGRLHGPGRRECQ

SEQ ID NO: 10451 - protein, 15 aa, synthetic construct
ACLLQPGEGPAVRRH

SEQ ID NO: 10452 - protein, 15 aa, synthetic construct
ACPCSPHLSHGRAGA

SEQ ID NO: 10453 - protein, 15 aa, synthetic construct
ACPDGAPTLVDVGPG

SEQ ID NO: 10454 - protein, 15 aa, synthetic construct
ACPGPGLHLRPDPSP

SEQ ID NO: 10455 - protein, 15 aa, synthetic construct
ACPQPGDEQPGPPGL

SEQ ID NO: 10456 - protein, 15 aa, synthetic construct
ACPRPPPPPPPRAPP

SEQ ID NO: 10457 - protein, 15 aa, synthetic construct
ACPRRRPQGGGGGDR

SEQ ID NO: 10458 - protein, 15 aa, synthetic construct
ACQVAGTAAVPEGCP

SEQ ID NO: 10459 - protein, 15 aa, synthetic construct
ACRAPPAAAAAAAVR

SEQ ID NO: 10460 - protein, 15 aa, synthetic construct
ACRPGAPGAGGAETR

SEQ ID NO: 10461 - protein, 15 aa, synthetic construct
ACRSRRTPLRSARAP

SEQ ID NO: 10462 - protein, 15 aa, synthetic construct
ACSHCAAAASATATL

SEQ ID NO: 10463 - protein, 15 aa, synthetic construct
ACSSDAGPNQKPAQA

SEQ ID NO: 10464 - protein, 15 aa, synthetic construct
ACTPSAAPASRRTGC

SEQ ID NO: 10465 - protein, 15 aa, synthetic construct
ACVQSVAESPATPLA

SEQ ID NO: 10466 - protein, 13 aa, synthetic construct
ACWQAPSPGPLGR

SEQ ID NO: 10467 - protein, 15 aa, synthetic construct
ADAAAGDEDGGRGGS

SEQ ID NO: 10468 - protein, 15 aa, synthetic construct
ADAAGAPGPLRGAAI

SEQ ID NO: 10469 - protein, 15 aa, synthetic construct
ADAAGHGQRAGAPAH

SEQ ID NO: 10470 - protein, 15 aa, synthetic construct
ADAAHPPPRAPRPAP

SEQ ID NO: 10471 - protein, 15 aa, synthetic construct
ADAGGDDAGHGVGAL

SEQ ID NO: 10472 - protein, 15 aa, synthetic construct
ADARTGRCTSGSCLG

SEQ ID NO: 10473 - protein, 15 aa, synthetic construct
ADATEEPASRAAAAS

SEQ ID NO: 10474 - protein, 15 aa, synthetic construct
ADAVPRAEVLPQPPV

SEQ ID NO: 10475 - protein, 15 aa, synthetic construct
ADEGGGLRGAASPAA

SEQ ID NO: 10476 - protein, 15 aa, synthetic construct
ADEQTGPVAGGKEAH

SEQ ID NO: 10477 - protein, 15 aa, synthetic construct
ADERPAPGAEDPVWP

SEQ ID NO: 10478 - protein, 15 aa, synthetic construct
ADFRVVGGGGRPHAL

SEQ ID NO: 10479 - protein, 15 aa, synthetic construct
ADGGRAAVGPEIPAA

SEQ ID NO: 10480 - protein, 15 aa, synthetic construct
ADGGWEKGQTLLPAN

SEQ ID NO: 10481 - protein, 15 aa, synthetic construct
ADHQALQPCAESLLP

SEQ ID NO: 10482 - protein, 15 aa, synthetic construct
ADHRGEQRPGPRHGR

SEQ ID NO: 10483 - protein, 15 aa, synthetic construct
ADHRVLRAEGPLRGH

SEQ ID NO: 10484 - protein, 15 aa, synthetic construct
ADKRGPNMGEKGSVA

SEQ ID NO: 10485 - protein, 15 aa, synthetic construct
ADLHVHGAGGGGEPG

SEQ ID NO: 10486 - protein, 15 aa, synthetic construct
ADLPGAPARALSPAP

SEQ ID NO: 10487 - protein, 15 aa, synthetic construct
ADLQLGPAPGTLPTS

SEQ ID NO: 10488 - protein, 13 aa, synthetic construct
ADLRCSRREAEKI

SEQ ID NO: 10489 - protein, 15 aa, synthetic construct
ADPAGLRPAAEPGWQ

SEQ ID NO: 10490 - protein, 15 aa, synthetic construct
ADPARRSSPAAAAAA

SEQ ID NO: 10491 - protein, 15 aa, synthetic construct
ADPDGGRGGGVPRTL

SEQ ID NO: 10492 - protein, 15 aa, synthetic construct
ADPGQLLWVPAWLQL

SEQ ID NO: 10493 - protein, 15 aa, synthetic construct
ADPGRAAQTPSSAAG

SEQ ID NO: 10494 - protein, 15 aa, synthetic construct
ADPIQRSLGGCGAFQ

SEQ ID NO: 10495 - protein, 15 aa, synthetic construct
ADPSAASLCAASPLA

SEQ ID NO: 10496 - protein, 15 aa, synthetic construct
ADPTGALASRLGGAT

SEQ ID NO: 10497 - protein, 15 aa, synthetic construct
ADPTHHLDPAGQRAG

SEQ ID NO: 10498 - protein, 15 aa, synthetic construct
ADPVIKSRAGGSPLA

SEQ ID NO: 10499 - protein, 15 aa, synthetic construct
ADQLRCGGLCHYLQQ

SEQ ID NO: 10500 - protein, 15 aa, synthetic construct
ADQQGAGIPSWGLVS

SEQ ID NO: 10501 - protein, 15 aa, synthetic construct
ADRFRRLQRRRRSCR

SEQ ID NO: 10502 - protein, 15 aa, synthetic construct
ADRGSQKETAKLRCC

SEQ ID NO: 10503 - protein, 15 aa, synthetic construct
ADRRGAPAAQTPCTC

SEQ ID NO: 10504 - protein, 15 aa, synthetic construct
ADRRRPGAGLRCQGR

SEQ ID NO: 10505 - protein, 15 aa, synthetic construct
ADSREGGSGRPRATG

SEQ ID NO: 10506 - protein, 15 aa, synthetic construct
ADSRGALPQLWHPGR

SEQ ID NO: 10507 - protein, 15 aa, synthetic construct
ADVAPTPPPYPSPPP

SEQ ID NO: 10508 - protein, 15 aa, synthetic construct
ADVDAGGGCDHVAPT

SEQ ID NO: 10509 - protein, 15 aa, synthetic construct
ADVFSSSSYFVSHDS

SEQ ID NO: 10510 - protein, 15 aa, synthetic construct
AEAAGSAGPPEGSGR

SEQ ID NO: 10511 - protein, 15 aa, synthetic construct
AEAAGVRVRPGPGAR

SEQ ID NO: 10512 - protein, 15 aa, synthetic construct
AEAAHAQEPRLRAVL

SEQ ID NO: 10513 - protein, 15 aa, synthetic construct
AEAASAGDECRGAAT

SEQ ID NO: 10514 - protein, 15 aa, synthetic construct
AEAASRSSGRLPICA

SEQ ID NO: 10515 - protein, 15 aa, synthetic construct
AEADAAAARGLGARA

SEQ ID NO: 10516 - protein, 15 aa, synthetic construct
AEAERARGRAGPVHP

SEQ ID NO: 10517 - protein, 15 aa, synthetic construct
AEAERHFGSHGRHGD

SEQ ID NO: 10518 - protein, 15 aa, synthetic construct
AEAGAEEQIWQRGTA

SEQ ID NO: 10519 - protein, 15 aa, synthetic construct
AEAGEPGGPAEDRPQ

SEQ ID NO: 10520 - protein, 14 aa, synthetic construct
AEAGGRGAGGRHHA

SEQ ID NO: 10521 - protein, 15 aa, synthetic construct
AEAHEPGPDPQLVPS

SEQ ID NO: 10522 - protein, 15 aa, synthetic construct
AEAPRGQDAHGALQP

SEQ ID NO: 10523 - protein, 15 aa, synthetic construct
AEATAGREPPRPRPP

SEQ ID NO: 10524 - protein, 15 aa, synthetic construct
AEAVETGLADHLPAE

SEQ ID NO: 10525 - protein, 15 aa, synthetic construct
AEAWHQRPPPPPAGA

SEQ ID NO: 10526 - protein, 15 aa, synthetic construct
AECAEHELLSPKAVP

SEQ ID NO: 10527 - protein, 15 aa, synthetic construct
AECGRAAAGGALPGL

SEQ ID NO: 10528 - protein, 15 aa, synthetic construct
AECRVSRSLPRRRPL

SEQ ID NO: 10529 - protein, 15 aa, synthetic construct
AEDADRGMGARLVLG

SEQ ID NO: 10530 - protein, 15 aa, synthetic construct
AEDEAAAEANAPRGA

SEQ ID NO: 10531 - protein, 12 aa, synthetic construct
AEEEAAGAPARS

SEQ ID NO: 10532 - protein, 12 aa, synthetic construct
AEEEAAGPPALG

SEQ ID NO: 10533 - protein, 15 aa, synthetic construct
AEEEAIQREAEEEAV

SEQ ID NO: 10534 - protein, 15 aa, synthetic construct
AEEEETPRVLRCWRP

SEQ ID NO: 10535 - protein, 12 aa, synthetic construct
AEEKTAGTQAGG

SEQ ID NO: 10536 - protein, 15 aa, synthetic construct
AEELRRAPPHAGGSV

SEQ ID NO: 10537 - protein, 15 aa, synthetic construct
AEEPGRPRRAGAAAA

SEQ ID NO: 10538 - protein, 15 aa, synthetic construct
AEERALQRGARPVPG

SEQ ID NO: 10539 - protein, 15 aa, synthetic construct
AEESHCCCSLCHPEE

SEQ ID NO: 10540 - protein, 15 aa, synthetic construct
AEEVSVGDGGPALRD

SEQ ID NO: 10541 - protein, 15 aa, synthetic construct
AEGAQAAAAGARVDR

SEQ ID NO: 10542 - protein, 15 aa, synthetic construct
AEGAQEPPGARRSAA

SEQ ID NO: 10543 - protein, 15 aa, synthetic construct
AEGCKCGGPSGLSPA

SEQ ID NO: 10544 - protein, 15 aa, synthetic construct
AEGEGAAVRPGAGDQ

SEQ ID NO: 10545 - protein, 15 aa, synthetic construct
AEGGAKSDTGGAGKG

SEQ ID NO: 10546 - protein, 15 aa, synthetic construct
AEGSVPGRDAGDLRP

SEQ ID NO: 10547 - protein, 15 aa, synthetic construct
AEHPRNRMGPILVVR

SEQ ID NO: 10548 - protein, 15 aa, synthetic construct
AEHQPRAIRDEQQDA

SEQ ID NO: 10549 - protein, 15 aa, synthetic construct
AEIAARLRRTGRPAR

SEQ ID NO: 10550 - protein, 15 aa, synthetic construct
AEIPAGGTGGGLPDH

SEQ ID NO: 10551 - protein, 15 aa, synthetic construct
AEISATFGMCAWWQG

SEQ ID NO: 10552 - protein, 15 aa, synthetic construct
AEKASLSCDLALHFH

SEQ ID NO: 10553 - protein, 15 aa, synthetic construct
AELARPLPGQRLALL

SEQ ID NO: 10554 - protein, 12 aa, synthetic construct
AELESCVLLLGQ

SEQ ID NO: 10555 - protein, 15 aa, synthetic construct
AELLRCPQLHAEEHA

SEQ ID NO: 10556 - protein, 15 aa, synthetic construct
AELPGRGGDDRGRQG

SEQ ID NO: 10557 - protein, 15 aa, synthetic construct
AELRAASAARLGQRA

SEQ ID NO: 10558 - protein, 15 aa, synthetic construct
AELRGHQGGAGSGLG

SEQ ID NO: 10559 - protein, 15 aa, synthetic construct
AEMRGRGGRGGGHGG

SEQ ID NO: 10560 - protein, 15 aa, synthetic construct
AEPAASGALRQPDRH

SEQ ID NO: 10561 - protein, 15 aa, synthetic construct
AEPAEGPSLGHVHPG

SEQ ID NO: 10562 - protein, 15 aa, synthetic construct
AEPAGEAALLVHRAH

SEQ ID NO: 10563 - protein, 14 aa, synthetic construct
AEPARGAAAGSRGG

SEQ ID NO: 10564 - protein, 15 aa, synthetic construct
AEPASGTAQGGGDAA

SEQ ID NO: 10565 - protein, 15 aa, synthetic construct
AEPEPGEGAAAVSRT

SEQ ID NO: 10566 - protein, 15 aa, synthetic construct
AEPFLNSAMTSLSES

SEQ ID NO: 10567 - protein, 15 aa, synthetic construct
AEPGHRRPPPNAAAA

SEQ ID NO: 10568 - protein, 15 aa, synthetic construct
AEPGRPAGRGHSPLG

SEQ ID NO: 10569 - protein, 14 aa, synthetic construct
AEPLPQRAAPRPGP

SEQ ID NO: 10570 - protein, 15 aa, synthetic construct
AEPPLQRDLRDQTGP

SEQ ID NO: 10571 - protein, 15 aa, synthetic construct
AEPQRGVAAGGRHPA

SEQ ID NO: 10572 - protein, 15 aa, synthetic construct
AEPRSQAGGLLLEDG

SEQ ID NO: 10573 - protein, 15 aa, synthetic construct
AEPSAGDQQAQRAGQ

SEQ ID NO: 10574 - protein, 15 aa, synthetic construct
AEPWSRVGLVDHTEP

SEQ ID NO: 10575 - protein, 15 aa, synthetic construct
AEQDECDRPRAGHGG

SEQ ID NO: 10576 - protein, 13 aa, synthetic construct
AEQEEEVQRAVPA

SEQ ID NO: 10577 - protein, 15 aa, synthetic construct
AEQLGHGAGGRRGPE

SEQ ID NO: 10578 - protein, 15 aa, synthetic construct
AEQRPEPQKKTSTDS

SEQ ID NO: 10579 - protein, 15 aa, synthetic construct
AEQVDERQQQEPGAR

SEQ ID NO: 10580 - protein, 15 aa, synthetic construct
AERAAAAQGEQPLQT

SEQ ID NO: 10581 - protein, 15 aa, synthetic construct
AERAAERGAAAATGG

SEQ ID NO: 10582 - protein, 15 aa, synthetic construct
AERGCVQTGALPSPP

SEQ ID NO: 10583 - protein, 15 aa, synthetic construct
AERPQSARAWRTQSR

SEQ ID NO: 10584 - protein, 15 aa, synthetic construct
AERQTSSFMSCATSY

SEQ ID NO: 10585 - protein, 15 aa, synthetic construct
AERRVRAWRAASSTG

SEQ ID NO: 10586 - protein, 14 aa, synthetic construct
AERWPRTADAGGSG

SEQ ID NO: 10587 - protein, 14 aa, synthetic construct
AESGAPSPTGLRVS

SEQ ID NO: 10588 - protein, 12 aa, synthetic construct
AESQDPLRGALR

SEQ ID NO: 10589 - protein, 15 aa, synthetic construct
AESQRSRNDEKSGTV

SEQ ID NO: 10590 - protein, 15 aa, synthetic construct
AESRATASTCTARRA

SEQ ID NO: 10591 - protein, 15 aa, synthetic construct
AESRRDGGLLRGGRG

SEQ ID NO: 10592 - protein, 15 aa, synthetic construct
AESSGQRGRRPAPAA

SEQ ID NO: 10593 - protein, 13 aa, synthetic construct
AESSLLPCAVPAP

SEQ ID NO: 10594 - protein, 15 aa, synthetic construct
AETEPGPGEEPTVPA

SEQ ID NO: 10595 - protein, 15 aa, synthetic construct
AETEPGPGEKPAVPA

SEQ ID NO: 10596 - protein, 15 aa, synthetic construct
AETGWCGGSCAAPAS

SEQ ID NO: 10597 - protein, 15 aa, synthetic construct
AETKEAESSPATDTA

SEQ ID NO: 10598 - protein, 15 aa, synthetic construct
AETLSRPPSPGPPLS

SEQ ID NO: 10599 - protein, 15 aa, synthetic construct
AETPPGRRPLAGLGT

SEQ ID NO: 10600 - protein, 15 aa, synthetic construct
AETPRLRPGGHECGR

SEQ ID NO: 10601 - protein, 15 aa, synthetic construct
AEVASGKGQRCLQTF

SEQ ID NO: 10602 - protein, 15 aa, synthetic construct
AEVCMEFSETPQKEM

SEQ ID NO: 10603 - protein, 15 aa, synthetic construct
AEVEVAAGLEVIGQR

SEQ ID NO: 10604 - protein, 15 aa, synthetic construct
AEWSSWFSAMPASCS

SEQ ID NO: 10605 - protein, 15 aa, synthetic construct
AEWVGEPPGSIRQPT

SEQ ID NO: 10606 - protein, 15 aa, synthetic construct
AEYQNLQRQLPPGLI

SEQ ID NO: 10607 - protein, 15 aa, synthetic construct
AFAKGAPDPCCGATE

SEQ ID NO: 10608 - protein, 15 aa, synthetic construct
AFLDRGCDSSPLGAA

SEQ ID NO: 10609 - protein, 15 aa, synthetic construct
AFLGPMAPPYVATIV

SEQ ID NO: 10610 - protein, 15 aa, synthetic construct
AFMFQIWEPIHEKRE

SEQ ID NO: 10611 - protein, 15 aa, synthetic construct
AFNRRGAGQLQEADH

SEQ ID NO: 10612 - protein, 15 aa, synthetic construct
AFPGSYIPAPGAQHR

SEQ ID NO: 10613 - protein, 12 aa, synthetic construct
AFPLVTHLERAV

SEQ ID NO: 10614 - protein, 15 aa, synthetic construct
AFRAAEGEGVPGGRP

SEQ ID NO: 10615 - protein, 15 aa, synthetic construct
AFTRRKHGCGPARRG

SEQ ID NO: 10616 - protein, 15 aa, synthetic construct
AGAAAETGGRRPALR

SEQ ID NO: 10617 - protein, 15 aa, synthetic construct
AGAAARAFPQDGVHA

SEQ ID NO: 10618 - protein, 15 aa, synthetic construct
AGAADSPPPPRSRGS

SEQ ID NO: 10619 - protein, 15 aa, synthetic construct
AGAAGGVAGPGARCL

SEQ ID NO: 10620 - protein, 15 aa, synthetic construct
AGAAGRPDPGVGRGA

SEQ ID NO: 10621 - protein, 15 aa, synthetic construct
AGAAGVAAEAAAAAA

SEQ ID NO: 10622 - protein, 15 aa, synthetic construct
AGAAPGPPTDSAAAG

SEQ ID NO: 10623 - protein, 15 aa, synthetic construct
AGAATGTPATTTTTI

SEQ ID NO: 10624 - protein, 15 aa, synthetic construct
AGADLPAARPGAPSR

SEQ ID NO: 10625 - protein, 15 aa, synthetic construct
AGAEDVDAAEPAHPL

SEQ ID NO: 10626 - protein, 15 aa, synthetic construct
AGAEGPRRAAEHLPG

SEQ ID NO: 10627 - protein, 15 aa, synthetic construct
AGAGARARRRGGGGR

SEQ ID NO: 10628 - protein, 15 aa, synthetic construct
AGAGDPAVGTAPRRR

SEQ ID NO: 10629 - protein, 15 aa, synthetic construct
AGAGGEHSGGPGRRD

SEQ ID NO: 10630 - protein, 15 aa, synthetic construct
AGAGKQACGGPLDHQ

SEQ ID NO: 10631 - protein, 15 aa, synthetic construct
AGAGLEAAGHPEQAL

SEQ ID NO: 10632 - protein, 15 aa, synthetic construct
AGAGPAAAAAASAGA

SEQ ID NO: 10633 - protein, 15 aa, synthetic construct
AGAGQRGAGEPHPGA

SEQ ID NO: 10634 - protein, 15 aa, synthetic construct
AGAGSAEGGGPPPGA

SEQ ID NO: 10635 - protein, 15 aa, synthetic construct
AGAGVGEWPGRGVGR

SEQ ID NO: 10636 - protein, 15 aa, synthetic construct
AGAHRQPQLPLLRAA

SEQ ID NO: 10637 - protein, 15 aa, synthetic construct
AGALGAAAAGPEATA

SEQ ID NO: 10638 - protein, 15 aa, synthetic construct
AGALGAVPGGGAEGL

SEQ ID NO: 10639 - protein, 15 aa, synthetic construct
AGALHAAAAAAAGPE

SEQ ID NO: 10640 - protein, 15 aa, synthetic construct
AGALQAPALAGEHAE

SEQ ID NO: 10641 - protein, 15 aa, synthetic construct
AGAPAPRWLPPAPAP

SEQ ID NO: 10642 - protein, 15 aa, synthetic construct
AGAPGADPRCCRCCC

SEQ ID NO: 10643 - protein, 15 aa, synthetic construct
AGAPGPGGDRRAGKR

SEQ ID NO: 10644 - protein, 15 aa, synthetic construct
AGAPPCPARRPAAPG

SEQ ID NO: 10645 - protein, 15 aa, synthetic construct
AGARGRRGRRGQADP

SEQ ID NO: 10646 - protein, 15 aa, synthetic construct
AGARLDVERRPLGGD

SEQ ID NO: 10647 - protein, 15 aa, synthetic construct
AGARQRLQQEQAARQ

SEQ ID NO: 10648 - protein, 15 aa, synthetic construct
AGASAAVWLSAEAVG

SEQ ID NO: 10649 - protein, 15 aa, synthetic construct
AGASRRPQPLRQDGA

SEQ ID NO: 10650 - protein, 15 aa, synthetic construct
AGCAAAGAGRTGAGQ

SEQ ID NO: 10651 - protein, 15 aa, synthetic construct
AGCHSPDPGPAGQCP

SEQ ID NO: 10652 - protein, 15 aa, synthetic construct
AGDAEGDLVGAGAPA

SEQ ID NO: 10653 - protein, 15 aa, synthetic construct
AGDGTLRPALGHRQR

SEQ ID NO: 10654 - protein, 15 aa, synthetic construct
AGDHPPCTHLPPRAP

SEQ ID NO: 10655 - protein, 15 aa, synthetic construct
AGDLDSDAGSPALRV

SEQ ID NO: 10656 - protein, 15 aa, synthetic construct
AGDLQTEVQGTAGGE

SEQ ID NO: 10657 - protein, 15 aa, synthetic construct
AGDPEQGGTAGVPGA

SEQ ID NO: 10658 - protein, 15 aa, synthetic construct
AGDPPPPCRVLQQPG

SEQ ID NO: 10659 - protein, 15 aa, synthetic construct
AGDQRHAAGGPGLPE

SEQ ID NO: 10660 - protein, 15 aa, synthetic construct
AGDRAGGVQRGRGGG

SEQ ID NO: 10661 - protein, 15 aa, synthetic construct
AGDRQAAHRGDAGGQ

SEQ ID NO: 10662 - protein, 15 aa, synthetic construct
AGDSGAAHSRGAESR

SEQ ID NO: 10663 - protein, 15 aa, synthetic construct
AGDVQPRPGCGDAGR

SEQ ID NO: 10664 - protein, 15 aa, synthetic construct
AGDVQPSQPPAAVFV

SEQ ID NO: 10665 - protein, 15 aa, synthetic construct
AGEAAGARTPPAPQS

SEQ ID NO: 10666 - protein, 15 aa, synthetic construct
AGEEAGRFVGRRPER

SEQ ID NO: 10667 - protein, 15 aa, synthetic construct
AGEEEEKIPWGGSSS

SEQ ID NO: 10668 - protein, 15 aa, synthetic construct
AGEGLPEPASGRGVV

SEQ ID NO: 10669 - protein, 15 aa, synthetic construct
AGEGQPGLPVSAEGG

SEQ ID NO: 10670 - protein, 15 aa, synthetic construct
AGEGRGRHRAAAHPG

SEQ ID NO: 10671 - protein, 15 aa, synthetic construct
AGEGVPAAAPRAAPA

SEQ ID NO: 10672 - protein, 15 aa, synthetic construct
AGELAGAGGHHQPHA

SEQ ID NO: 10673 - protein, 15 aa, synthetic construct
AGELTAGAAAQRGGS

SEQ ID NO: 10674 - protein, 15 aa, synthetic construct
AGEPDQEHVRVPGPG

SEQ ID NO: 10675 - protein, 15 aa, synthetic construct
AGERPEEGFRAGVFP

SEQ ID NO: 10676 - protein, 15 aa, synthetic construct
AGERQEARRRAAEAA

SEQ ID NO: 10677 - protein, 15 aa, synthetic construct
AGETTARSSPGPAAP

SEQ ID NO: 10678 - protein, 15 aa, synthetic construct
AGFKTEGQGSQFSLG

SEQ ID NO: 10679 - protein, 15 aa, synthetic construct
AGFPAARPSARPGAA

SEQ ID NO: 10680 - protein, 15 aa, synthetic construct
AGGAACGGRGGGAAG

SEQ ID NO: 10681 - protein, 15 aa, synthetic construct
AGGAGLSPRGGGGGD

SEQ ID NO: 10682 - protein, 15 aa, synthetic construct
AGGAGRAGGRPGARR

SEQ ID NO: 10683 - protein, 15 aa, synthetic construct
AGGARGGGARAGGAA

SEQ ID NO: 10684 - protein, 15 aa, synthetic construct
AGGASGAMPAAGLPL

SEQ ID NO: 10685 - protein, 15 aa, synthetic construct
AGGASRGQGAAAPRS

SEQ ID NO: 10686 - protein, 15 aa, synthetic construct
AGGCDSGLPGDPGPR

SEQ ID NO: 10687 - protein, 15 aa, synthetic construct
AGGDGRAETPGAAGP

SEQ ID NO: 10688 - protein, 15 aa, synthetic construct
AGGEAMAQVDPETRQ

SEQ ID NO: 10689 - protein, 15 aa, synthetic construct
AGGEARNPERGRGTG

SEQ ID NO: 10690 - protein, 15 aa, synthetic construct
AGGEPVPMDRCSPGK

SEQ ID NO: 10691 - protein, 15 aa, synthetic construct
AGGESAAAGPPGRDP

SEQ ID NO: 10692 - protein, 15 aa, synthetic construct
AGGGERECPRADAAP

SEQ ID NO: 10693 - protein, 15 aa, synthetic construct
AGGGGGERPLPGVGS

SEQ ID NO: 10694 - protein, 15 aa, synthetic construct
AGGGGLPAGQEIPAR

SEQ ID NO: 10695 - protein, 15 aa, synthetic construct
AGGIEAWPLAPRSPG

SEQ ID NO: 10696 - protein, 15 aa, synthetic construct
AGGPAGPAHPGEPRP

SEQ ID NO: 10697 - protein, 15 aa, synthetic construct
AGGPGRGAAGARGGH

SEQ ID NO: 10698 - protein, 15 aa, synthetic construct
AGGRGAGRPLLPPGT

SEQ ID NO: 10699 - protein, 15 aa, synthetic construct
AGGRGGPGGAGQRAA

SEQ ID NO: 10700 - protein, 15 aa, synthetic construct
AGGRGQEAAAAHSRG

SEQ ID NO: 10701 - protein, 15 aa, synthetic construct
AGGRGRRRRRGGRRQ

SEQ ID NO: 10702 - protein, 15 aa, synthetic construct
AGGRRRRRGRGGAGP

SEQ ID NO: 10703 - protein, 15 aa, synthetic construct
AGGSAGAAAAPPTRG

SEQ ID NO: 10704 - protein, 15 aa, synthetic construct
AGGSDGRELGAAAAE

SEQ ID NO: 10705 - protein, 15 aa, synthetic construct
AGGSGRGAGEHAEGV

SEQ ID NO: 10706 - protein, 15 aa, synthetic construct
AGGTSPRLHREEAAR

SEQ ID NO: 10707 - protein, 15 aa, synthetic construct
AGGVPGGGAPGAGAR

SEQ ID NO: 10708 - protein, 15 aa, synthetic construct
AGHAAEPGARAVRAP

SEQ ID NO: 10709 - protein, 15 aa, synthetic construct
AGHAEQRAGGLHGGG

SEQ ID NO: 10710 - protein, 15 aa, synthetic construct
AGHAGPPGAAEHLPG

SEQ ID NO: 10711 - protein, 15 aa, synthetic construct
AGHEAVPLLPAAPGR

SEQ ID NO: 10712 - protein, 15 aa, synthetic construct
AGHEGVAGPAKHLPG

SEQ ID NO: 10713 - protein, 15 aa, synthetic construct
AGHERGPLPAALQPV

SEQ ID NO: 10714 - protein, 15 aa, synthetic construct
AGHLRGQAEPQPADH

SEQ ID NO: 10715 - protein, 15 aa, synthetic construct
AGHLRHLPPQADADR

SEQ ID NO: 10716 - protein, 15 aa, synthetic construct
AGHPEDPPAADLQDR

SEQ ID NO: 10717 - protein, 15 aa, synthetic construct
AGHPGRLQNEVGTAQ

SEQ ID NO: 10718 - protein, 15 aa, synthetic construct
AGHRRSAEHPRPARL

SEQ ID NO: 10719 - protein, 15 aa, synthetic construct
AGHSQPPADPFHQGH

SEQ ID NO: 10720 - protein, 15 aa, synthetic construct
AGLAQQQPENLLQVS

SEQ ID NO: 10721 - protein, 15 aa, synthetic construct
AGLEAADAGRRPGAG

SEQ ID NO: 10722 - protein, 15 aa, synthetic construct
AGLGGREHGPLELHL

SEQ ID NO: 10723 - protein, 13 aa, synthetic construct
AGLGNPWSLSQRP

SEQ ID NO: 10724 - protein, 15 aa, synthetic construct
AGLHAGDSAGAAGRP

SEQ ID NO: 10725 - protein, 15 aa, synthetic construct
AGLLRRATGGSCFAG

SEQ ID NO: 10726 - protein, 15 aa, synthetic construct
AGLPHQRLRPGGPGG

SEQ ID NO: 10727 - protein, 15 aa, synthetic construct
AGLRAASGGLAGLPD

SEQ ID NO: 10728 - protein, 15 aa, synthetic construct
AGLRAGRASPPGPER

SEQ ID NO: 10729 - protein, 15 aa, synthetic construct
AGLRDASGGLAGLPD

SEQ ID NO: 10730 - protein, 15 aa, synthetic construct
AGLRNRSQLSVLPTG

SEQ ID NO: 10731 - protein, 15 aa, synthetic construct
AGLRRGDRLPGRVGA

SEQ ID NO: 10732 - protein, 15 aa, synthetic construct
AGLSGGGDVRLEPAG

SEQ ID NO: 10733 - protein, 12 aa, synthetic construct
AGNHRQRGPHQV

SEQ ID NO: 10734 - protein, 15 aa, synthetic construct
AGPAAAAAADAAAAR

SEQ ID NO: 10735 - protein, 15 aa, synthetic construct
AGPAAAAARSGAPRQ

SEQ ID NO: 10736 - protein, 15 aa, synthetic construct
AGPAAADAEHARRRR

SEQ ID NO: 10737 - protein, 15 aa, synthetic construct
AGPAAAGGPACPAEP

SEQ ID NO: 10738 - protein, 15 aa, synthetic construct
AGPAAAGSAAAPAAR

SEQ ID NO: 10739 - protein, 15 aa, synthetic construct
AGPAAGEGGGDIRAT

SEQ ID NO: 10740 - protein, 15 aa, synthetic construct
AGPAARRQQEAGDLR

SEQ ID NO: 10741 - protein, 15 aa, synthetic construct
AGPAGADAGEQRGPE

SEQ ID NO: 10742 - protein, 15 aa, synthetic construct
AGPAHLPQPAAAAGG

SEQ ID NO: 10743 - protein, 15 aa, synthetic construct
AGPARRGGPGRRRSR

SEQ ID NO: 10744 - protein, 15 aa, synthetic construct
AGPASHQPGPSAVCP

SEQ ID NO: 10745 - protein, 15 aa, synthetic construct
AGPCSQYSGHAAPRD

SEQ ID NO: 10746 - protein, 15 aa, synthetic construct
AGPCVGYPPAASQPA

SEQ ID NO: 10747 - protein, 15 aa, synthetic construct
AGPDRADAAAVCGAA

SEQ ID NO: 10748 - protein, 15 aa, synthetic construct
AGPDRRLRSLRLARR

SEQ ID NO: 10749 - protein, 15 aa, synthetic construct
AGPEEAGAAGAHHQP

SEQ ID NO: 10750 - protein, 15 aa, synthetic construct
AGPEPGDHPRLQPPA

SEQ ID NO: 10751 - protein, 15 aa, synthetic construct
AGPEPLGPRDGAEEP

SEQ ID NO: 10752 - protein, 15 aa, synthetic construct
AGPGDGPGVGTSYGY

SEQ ID NO: 10753 - protein, 15 aa, synthetic construct
AGPGGGARGGAGAAA

SEQ ID NO: 10754 - protein, 15 aa, synthetic construct
AGPGGGGGGRGGGRG

SEQ ID NO: 10755 - protein, 15 aa, synthetic construct
AGPGLAATWAAPAAR

SEQ ID NO: 10756 - protein, 15 aa, synthetic construct
AGPGLPGGGRPHELL

SEQ ID NO: 10757 - protein, 15 aa, synthetic construct
AGPGPQGEFVRFPRP

SEQ ID NO: 10758 - protein, 15 aa, synthetic construct
AGPGRATGGLTGRRP

SEQ ID NO: 10759 - protein, 15 aa, synthetic construct
AGPGRVRAGGAAAGA

SEQ ID NO: 10760 - protein, 15 aa, synthetic construct
AGPLRAAPRAAALRP

SEQ ID NO: 10761 - protein, 15 aa, synthetic construct
AGPLRGGAGGCGARA

SEQ ID NO: 10762 - protein, 15 aa, synthetic construct
AGPLSARGVSAGAVA

SEQ ID NO: 10763 - protein, 15 aa, synthetic construct
AGPPAAAPAAVCPAA

SEQ ID NO: 10764 - protein, 15 aa, synthetic construct
AGPPGAEGEGGIQQE

SEQ ID NO: 10765 - protein, 15 aa, synthetic construct
AGPPGEHSPRGMDHR

SEQ ID NO: 10766 - protein, 15 aa, synthetic construct
AGPPGRAERRGPEPL

SEQ ID NO: 10767 - protein, 15 aa, synthetic construct
AGPPQRRGAGARGTL

SEQ ID NO: 10768 - protein, 15 aa, synthetic construct
AGPPRARPGPRARLP

SEQ ID NO: 10769 - protein, 15 aa, synthetic construct
AGPQGRARRAQDAAG

SEQ ID NO: 10770 - protein, 15 aa, synthetic construct
AGPREAARAPAPSQT

SEQ ID NO: 10771 - protein, 15 aa, synthetic construct
AGPRRAAHGGARGAL

SEQ ID NO: 10772 - protein, 15 aa, synthetic construct
AGPRRATAPEREGAG

SEQ ID NO: 10773 - protein, 15 aa, synthetic construct
AGPRRGRSAFVPGPL

SEQ ID NO: 10774 - protein, 15 aa, synthetic construct
AGPSAASLCAVSPPA

SEQ ID NO: 10775 - protein, 15 aa, synthetic construct
AGPTPPGPEGGLPSG

SEQ ID NO: 10776 - protein, 15 aa, synthetic construct
AGQASVPLVETPTRP

SEQ ID NO: 10777 - protein, 15 aa, synthetic construct
AGQMGQGGGDMGRGS

SEQ ID NO: 10778 - protein, 15 aa, synthetic construct
AGQQRQERAARGGAE

SEQ ID NO: 10779 - protein, 15 aa, synthetic construct
AGQSSVRGPKVPGGG

SEQ ID NO: 10780 - protein, 12 aa, synthetic construct
AGQVQQHEGHAG

SEQ ID NO: 10781 - protein, 15 aa, synthetic construct
AGRAAFAGRVHRGQR

SEQ ID NO: 10782 - protein, 15 aa, synthetic construct
AGRAAVAELDAPGEP

SEQ ID NO: 10783 - protein, 15 aa, synthetic construct
AGRAGAELHDHRPEP

SEQ ID NO: 10784 - protein, 15 aa, synthetic construct
AGRAGGRRQRPGGAV

SEQ ID NO: 10785 - protein, 15 aa, synthetic construct
AGRARNHSRGLRTNP

SEQ ID NO: 10786 - protein, 15 aa, synthetic construct
AGRDRGAARDRGGDH

SEQ ID NO: 10787 - protein, 15 aa, synthetic construct
AGREPPAQGECALQA

SEQ ID NO: 10788 - protein, 15 aa, synthetic construct
AGRESAAGVGELYGA

SEQ ID NO: 10789 - protein, 15 aa, synthetic construct
AGRGDQGDWNNQYGK

SEQ ID NO: 10790 - protein, 15 aa, synthetic construct
AGRGERGGARGGRGA

SEQ ID NO: 10791 - protein, 15 aa, synthetic construct
AGRKVLEGDGRDRNV

SEQ ID NO: 10792 - protein, 15 aa, synthetic construct
AGRLGGAGAALAGPA

SEQ ID NO: 10793 - protein, 15 aa, synthetic construct
AGRLQLHRPELPPGP

SEQ ID NO: 10794 - protein, 15 aa, synthetic construct
AGRLRPRGPGQQEPE

SEQ ID NO: 10795 - protein, 15 aa, synthetic construct
AGRLRRRAPGGAGRG

SEQ ID NO: 10796 - protein, 15 aa, synthetic construct
AGRMGVQPATADLTC

SEQ ID NO: 10797 - protein, 15 aa, synthetic construct
AGRPAGSTGGPGLRA

SEQ ID NO: 10798 - protein, 15 aa, synthetic construct
AGRPEDFPSPPGRLG

SEQ ID NO: 10799 - protein, 15 aa, synthetic construct
AGRPGEAGCRGPGPP

SEQ ID NO: 10800 - protein, 15 aa, synthetic construct
AGRPRGHLRGHLRGW

SEQ ID NO: 10801 - protein, 15 aa, synthetic construct
AGRPRRAHLCAARPL

SEQ ID NO: 10802 - protein, 15 aa, synthetic construct
AGRQGEQVSQGDGDR

SEQ ID NO: 10803 - protein, 15 aa, synthetic construct
AGRQRRTGAPAGASA

SEQ ID NO: 10804 - protein, 14 aa, synthetic construct
AGRQSQDGGRQEGE

SEQ ID NO: 10805 - protein, 15 aa, synthetic construct
AGRRAPGGRRGWRRR

SEQ ID NO: 10806 - protein, 15 aa, synthetic construct
AGRRSGARGAGAAIP

SEQ ID NO: 10807 - protein, 15 aa, synthetic construct
AGRRVGPVRHPARGR

SEQ ID NO: 10808 - protein, 15 aa, synthetic construct
AGRTRAGGAPAAARA

SEQ ID NO: 10809 - protein, 15 aa, synthetic construct
AGSELGDGEGQTSHP

SEQ ID NO: 10810 - protein, 15 aa, synthetic construct
AGSGDEVAAGGSRAV

SEQ ID NO: 10811 - protein, 15 aa, synthetic construct
AGSGPASGRAAPAAG

SEQ ID NO: 10812 - protein, 15 aa, synthetic construct
AGSGVAGGGAWVSAQ

SEQ ID NO: 10813 - protein, 15 aa, synthetic construct
AGSRDKTGPPEPPDS

SEQ ID NO: 10814 - protein, 15 aa, synthetic construct
AGTAAASAPAAAALR

SEQ ID NO: 10815 - protein, 15 aa, synthetic construct
AGTRRNRKKQNSAKE

SEQ ID NO: 10816 - protein, 15 aa, synthetic construct
AGVAPSAIRDREQQA

SEQ ID NO: 10817 - protein, 15 aa, synthetic construct
AGVDAVGAARVARAG

SEQ ID NO: 10818 - protein, 15 aa, synthetic construct
AGVPGRPLGPDKRQV

SEQ ID NO: 10819 - protein, 15 aa, synthetic construct
AGVPGVEEKSTGATA

SEQ ID NO: 10820 - protein, 15 aa, synthetic construct
AGVPRREGLPRLDVA

SEQ ID NO: 10821 - protein, 15 aa, synthetic construct
AGVPRRRRCRRPRAA

SEQ ID NO: 10822 - protein, 15 aa, synthetic construct
AGVRGGPPSAVRRPG

SEQ ID NO: 10823 - protein, 15 aa, synthetic construct
AGVRPPGGSGAAAGL

SEQ ID NO: 10824 - protein, 15 aa, synthetic construct
AGVRVLPEQQGGDGA

SEQ ID NO: 10825 - protein, 15 aa, synthetic construct
AHAAAARAGGVWAER

SEQ ID NO: 10826 - protein, 15 aa, synthetic construct
AHAPQEGAAAAGPGP

SEQ ID NO: 10827 - protein, 15 aa, synthetic construct
AHDPAGGPVQHRQDH

SEQ ID NO: 10828 - protein, 15 aa, synthetic construct
AHDPEGHDVHQDLRR

SEQ ID NO: 10829 - protein, 15 aa, synthetic construct
AHEESARLRPGLPVG

SEQ ID NO: 10830 - protein, 15 aa, synthetic construct
AHGGASKGACTATGA

SEQ ID NO: 10831 - protein, 15 aa, synthetic construct
AHGNDLPPRQSLVPE

SEQ ID NO: 10832 - protein, 15 aa, synthetic construct
AHHAEDRVGDPLARR

SEQ ID NO: 10833 - protein, 15 aa, synthetic construct
AHHVAAPRAEPEGAG

SEQ ID NO: 10834 - protein, 15 aa, synthetic construct
AHLPAERRRRPPGPH

SEQ ID NO: 10835 - protein, 15 aa, synthetic construct
AHLPRRPGGTPRPGA

SEQ ID NO: 10836 - protein, 15 aa, synthetic construct
AHPPRGAPTAPATWE

SEQ ID NO: 10837 - protein, 15 aa, synthetic construct
AHPPSPGSRTEGSDP

SEQ ID NO: 10838 - protein, 15 aa, synthetic construct
AHPRLQRGLQRAAPG

SEQ ID NO: 10839 - protein, 15 aa, synthetic construct
AHRADLGNHAGALPA

SEQ ID NO: 10840 - protein, 15 aa, synthetic construct
AHRDGGGDPQRGPGA

SEQ ID NO: 10841 - protein, 15 aa, synthetic construct
AHRGFGAAEPDPGAR

SEQ ID NO: 10842 - protein, 15 aa, synthetic construct
AHRHGDPRERGEEAH

SEQ ID NO: 10843 - protein, 15 aa, synthetic construct
AHRLHRRPQARDPAE

SEQ ID NO: 10844 - protein, 15 aa, synthetic construct
AHRRPAQGARRRAAP

SEQ ID NO: 10845 - protein, 15 aa, synthetic construct
AHRVPPAARPPGLQA

SEQ ID NO: 10846 - protein, 15 aa, synthetic construct
AHSGTQSEPPQPGHR

SEQ ID NO: 10847 - protein, 15 aa, synthetic construct
AHSRLPAHVRAGAPA

SEQ ID NO: 10848 - protein, 15 aa, synthetic construct
AHYPEPGAVQAPPGP

SEQ ID NO: 10849 - protein, 15 aa, synthetic construct
AIAGALRVAHGGEAT

SEQ ID NO: 10850 - protein, 15 aa, synthetic construct
AIDRAARADHGAVQP

SEQ ID NO: 10851 - protein, 15 aa, synthetic construct
AIESDRKHANSIPLN

SEQ ID NO: 10852 - protein, 15 aa, synthetic construct
AIFLNPWIPAMGMRK

SEQ ID NO: 10853 - protein, 15 aa, synthetic construct
AIGGCPELGGARGCC

SEQ ID NO: 10854 - protein, 15 aa, synthetic construct
AIGSPPPSPCPWSAN

SEQ ID NO: 10855 - protein, 15 aa, synthetic construct
AIPASTPRGTRRPRR

SEQ ID NO: 10856 - protein, 15 aa, synthetic construct
AIPIAAPAAELARSP

SEQ ID NO: 10857 - protein, 15 aa, synthetic construct
AIPLASSREELPGAA

SEQ ID NO: 10858 - protein, 15 aa, synthetic construct
AIPSGSPMPARHGPR

SEQ ID NO: 10859 - protein, 15 aa, synthetic construct
AIQTAGVAETEAPGA

SEQ ID NO: 10860 - protein, 15 aa, synthetic construct
AISPLKSGNSPSNHL

SEQ ID NO: 10861 - protein, 15 aa, synthetic construct
AITRGRASAAVPCRS

SEQ ID NO: 10862 - protein, 15 aa, synthetic construct
AITTDRHSWAGAAES

SEQ ID NO: 10863 - protein, 15 aa, synthetic construct
AKARDHGAVSADLGP

SEQ ID NO: 10864 - protein, 15 aa, synthetic construct
AKCRLGSRRARGGRG

SEQ ID NO: 10865 - protein, 12 aa, synthetic construct
AKEESDLPRRGR

SEQ ID NO: 10866 - protein, 15 aa, synthetic construct
AKGAARQPQPHHEPA

SEQ ID NO: 10867 - protein, 15 aa, synthetic construct
AKIREEQAIAGGLCN

SEQ ID NO: 10868 - protein, 15 aa, synthetic construct
AKLQVRQSDRPGEQE

SEQ ID NO: 10869 - protein, 15 aa, synthetic construct
AKLRRFSPPLHTSGE

SEQ ID NO: 10870 - protein, 15 aa, synthetic construct
AKPGALGRGAPGELR

SEQ ID NO: 10871 - protein, 15 aa, synthetic construct
AKPTEENHFLHGRSV

SEQ ID NO: 10872 - protein, 15 aa, synthetic construct
AKQRAASGTRAQGRP

SEQ ID NO: 10873 - protein, 15 aa, synthetic construct
AKRKKSTHVCTGCFA

SEQ ID NO: 10874 - protein, 15 aa, synthetic construct
AKRPARSRLVPLGSL

SEQ ID NO: 10875 - protein, 15 aa, synthetic construct
AKTSARRPAAAPAAV

SEQ ID NO: 10876 - protein, 15 aa, synthetic construct
AKTSVRRPAAAPAAV

SEQ ID NO: 10877 - protein, 15 aa, synthetic construct
AKYSHEEKGAADGEE

SEQ ID NO: 10878 - protein, 15 aa, synthetic construct
ALAAAAAALRRPRPR

SEQ ID NO: 10879 - protein, 15 aa, synthetic construct
ALAAAAPRAPQEAAP

SEQ ID NO: 10880 - protein, 15 aa, synthetic construct
ALAAAPAAAAAAGRL

SEQ ID NO: 10881 - protein, 15 aa, synthetic construct
ALAALSPQAGSRCSK

SEQ ID NO: 10882 - protein, 15 aa, synthetic construct
ALADSGAPAFPVSNV

SEQ ID NO: 10883 - protein, 15 aa, synthetic construct
ALAGAGEVSGRLGTG

SEQ ID NO: 10884 - protein, 15 aa, synthetic construct
ALAPARGCRSPSPGV

SEQ ID NO: 10885 - protein, 15 aa, synthetic construct
ALARQPRPRAADTRR

SEQ ID NO: 10886 - protein, 15 aa, synthetic construct
ALATPKSSTTWCASG

SEQ ID NO: 10887 - protein, 13 aa, synthetic construct
ALAVERNPLGVAA

SEQ ID NO: 10888 - protein, 15 aa, synthetic construct
ALAVFGVHQEEGLPV

SEQ ID NO: 10889 - protein, 15 aa, synthetic construct
ALCLHSAEAEPGPFI

SEQ ID NO: 10890 - protein, 15 aa, synthetic construct
ALCTPRPGEDADPGR

SEQ ID NO: 10891 - protein, 15 aa, synthetic construct
ALDLRAALGPSLPGG

SEQ ID NO: 10892 - protein, 15 aa, synthetic construct
ALEADGVQDPHHEVG

SEQ ID NO: 10893 - protein, 12 aa, synthetic construct
ALEAPEDPAEPS

SEQ ID NO: 10894 - protein, 14 aa, synthetic construct
ALEDVAASAVVLQC

SEQ ID NO: 10895 - protein, 15 aa, synthetic construct
ALEQQRQRQRQRERE

SEQ ID NO: 10896 - protein, 15 aa, synthetic construct
ALESGERGGFRGPGG

SEQ ID NO: 10897 - protein, 15 aa, synthetic construct
ALFPRATAAPRGRGR

SEQ ID NO: 10898 - protein, 15 aa, synthetic construct
ALFRGPPPPSFSLRW

SEQ ID NO: 10899 - protein, 15 aa, synthetic construct
ALFTPLVALGREGGS

SEQ ID NO: 10900 - protein, 15 aa, synthetic construct
ALGALASLCAPLEAS

SEQ ID NO: 10901 - protein, 15 aa, synthetic construct
ALGALQAIPAAQTPH

SEQ ID NO: 10902 - protein, 15 aa, synthetic construct
ALGCEDKMLRSQGTA

SEQ ID NO: 10903 - protein, 15 aa, synthetic construct
ALGFQYAGSGEDGRA

SEQ ID NO: 10904 - protein, 15 aa, synthetic construct
ALGGDGRRLHDPRGG

SEQ ID NO: 10905 - protein, 15 aa, synthetic construct
ALGGRHPPWQGEAPG

SEQ ID NO: 10906 - protein, 15 aa, synthetic construct
ALGLHLIAQRGPRPG

SEQ ID NO: 10907 - protein, 15 aa, synthetic construct
ALGREVAGARPQAPG

SEQ ID NO: 10908 - protein, 15 aa, synthetic construct
ALGRRRERGVHGPFG

SEQ ID NO: 10909 - protein, 15 aa, synthetic construct
ALGTLAKVAGRQDAA

SEQ ID NO: 10910 - protein, 15 aa, synthetic construct
ALGVGAAEECVPGRG

SEQ ID NO: 10911 - protein, 15 aa, synthetic construct
ALGVVAAAALGEAAV

SEQ ID NO: 10912 - protein, 15 aa, synthetic construct
ALHEGSAEGPEPGWQ

SEQ ID NO: 10913 - protein, 15 aa, synthetic construct
ALHEKDLKQHDRFRS

SEQ ID NO: 10914 - protein, 15 aa, synthetic construct
ALLAHQVSEEEQAYA

SEQ ID NO: 10915 - protein, 15 aa, synthetic construct
ALLDYISQLQQRSCQ

SEQ ID NO: 10916 - protein, 15 aa, synthetic construct
ALLLQRDDLLGPGGR

SEQ ID NO: 10917 - protein, 13 aa, synthetic construct
ALLPGQNVGIPHE

SEQ ID NO: 10918 - protein, 15 aa, synthetic construct
ALLRGADAAGPGGEL

SEQ ID NO: 10919 - protein, 15 aa, synthetic construct
ALLRREARALPAGVR

SEQ ID NO: 10920 - protein, 15 aa, synthetic construct
ALNHRTTSTEPPSAL

SEQ ID NO: 10921 - protein, 15 aa, synthetic construct
ALPAHAAAARPRPGG

SEQ ID NO: 10922 - protein, 15 aa, synthetic construct
ALPAPAPGRRPRAQG

SEQ ID NO: 10923 - protein, 15 aa, synthetic construct
ALPARAPGAGRVLRL

SEQ ID NO: 10924 - protein, 15 aa, synthetic construct
ALPASHAAGQPPPCG

SEQ ID NO: 10925 - protein, 15 aa, synthetic construct
ALPEAGRTDSFCRGV

SEQ ID NO: 10926 - protein, 15 aa, synthetic construct
ALPERAELLPGCGQL

SEQ ID NO: 10927 - protein, 15 aa, synthetic construct
ALPGGPVDPGGQSGQ

SEQ ID NO: 10928 - protein, 15 aa, synthetic construct
ALPPVPGSVPSSTRT

SEQ ID NO: 10929 - protein, 15 aa, synthetic construct
ALPQPALPAARRLQP

SEQ ID NO: 10930 - protein, 15 aa, synthetic construct
ALPRRAEAELARPAQ

SEQ ID NO: 10931 - protein, 15 aa, synthetic construct
ALPSGPGRLAPALPR

SEQ ID NO: 10932 - protein, 15 aa, synthetic construct
ALPSSTWCASSSPTG

SEQ ID NO: 10933 - protein, 15 aa, synthetic construct
ALPTSGVQPDPLSGQ

SEQ ID NO: 10934 - protein, 15 aa, synthetic construct
ALPVRQRVRPASPQR

SEQ ID NO: 10935 - protein, 15 aa, synthetic construct
ALPVWAMSGAGFLSC

SEQ ID NO: 10936 - protein, 15 aa, synthetic construct
ALPWPLWGAGGSNNF

SEQ ID NO: 10937 - protein, 15 aa, synthetic construct
ALQFGAPPAPAWRPE

SEQ ID NO: 10938 - protein, 15 aa, synthetic construct
ALQPLLGALSGPEQN

SEQ ID NO: 10939 - protein, 15 aa, synthetic construct
ALQRDSSSTQCRRRR

SEQ ID NO: 10940 - protein, 15 aa, synthetic construct
ALRATGGAGAERAAQ

SEQ ID NO: 10941 - protein, 15 aa, synthetic construct
ALRGPKRAAAGGAAA

SEQ ID NO: 10942 - protein, 15 aa, synthetic construct
ALRGPLGQPGFVGEP

SEQ ID NO: 10943 - protein, 15 aa, synthetic construct
ALRGRASVEFGPLFL

SEQ ID NO: 10944 - protein, 15 aa, synthetic construct
ALRLEPGGGVEPHGA

SEQ ID NO: 10945 - protein, 15 aa, synthetic construct
ALRLLQRRAREGPAA

SEQ ID NO: 10946 - protein, 12 aa, synthetic construct
ALRPAFQAAAEL

SEQ ID NO: 10947 - protein, 15 aa, synthetic construct
ALRPDSCGPGVGRVG

SEQ ID NO: 10948 - protein, 15 aa, synthetic construct
ALRPGRLPRLRRPQA

SEQ ID NO: 10949 - protein, 15 aa, synthetic construct
ALRPLPPPPLGRRGG

SEQ ID NO: 10950 - protein, 15 aa, synthetic construct
ALRPRPACQRCSPPQ

SEQ ID NO: 10951 - protein, 15 aa, synthetic construct
ALRQLPRGCLPRMLL

SEQ ID NO: 10952 - protein, 14 aa, synthetic construct
ALRRCPGSSALRRA

SEQ ID NO: 10953 - protein, 15 aa, synthetic construct
ALRRGRPDAAGLGAD

SEQ ID NO: 10954 - protein, 15 aa, synthetic construct
ALSCPPTRPRPSAPA

SEQ ID NO: 10955 - protein, 15 aa, synthetic construct
ALSDGEAERGLWDPV

SEQ ID NO: 10956 - protein, 15 aa, synthetic construct
ALSGGSSASRPRTTA

SEQ ID NO: 10957 - protein, 15 aa, synthetic construct
ALSPAGQPPPPGGGD

SEQ ID NO: 10958 - protein, 15 aa, synthetic construct
ALSPGGAGAGDRCVP

SEQ ID NO: 10959 - protein, 15 aa, synthetic construct
ALSPGLPAEPRRRRA

SEQ ID NO: 10960 - protein, 15 aa, synthetic construct
ALSPQLATGDPRMSQ

SEQ ID NO: 10961 - protein, 15 aa, synthetic construct
ALSRDSRVILAPDRQ

SEQ ID NO: 10962 - protein, 15 aa, synthetic construct
ALTLLPAPTPNSGIT

SEQ ID NO: 10963 - protein, 15 aa, synthetic construct
ALTRRLARSPRAASC

SEQ ID NO: 10964 - protein, 15 aa, synthetic construct
ALVGAPKGAVALVGA

SEQ ID NO: 10965 - protein, 15 aa, synthetic construct
ALVGSGAVGDATQEL

SEQ ID NO: 10966 - protein, 15 aa, synthetic construct
ALVSEGRPQPSGGAL

SEQ ID NO: 10967 - protein, 15 aa, synthetic construct
ALVSPPDLGPGAEAG

SEQ ID NO: 10968 - protein, 15 aa, synthetic construct
ALWPLCSARLAGEPL

SEQ ID NO: 10969 - protein, 15 aa, synthetic construct
AMAAAMKDADMVVAT

SEQ ID NO: 10970 - protein, 15 aa, synthetic construct
AMALNMVTLDMPATF

SEQ ID NO: 10971 - protein, 15 aa, synthetic construct
AMASARPGAGAPPAW

SEQ ID NO: 10972 - protein, 15 aa, synthetic construct
AMGGETDGAGRTRDG

SEQ ID NO: 10973 - protein, 15 aa, synthetic construct
AMPPMPWGAPGDVPS

SEQ ID NO: 10974 - protein, 15 aa, synthetic construct
AMPVPASKAPARNLS

SEQ ID NO: 10975 - protein, 15 aa, synthetic construct
AMQPLLGSGAELVGA

SEQ ID NO: 10976 - protein, 15 aa, synthetic construct
AMRGARPGAGLRLLL

SEQ ID NO: 10977 - protein, 15 aa, synthetic construct
AMWQTRKFASSRFQG

SEQ ID NO: 10978 - protein, 15 aa, synthetic construct
ANDDCPTVDRGCPCA

SEQ ID NO: 10979 - protein, 15 aa, synthetic construct
ANGCHCLGGAPRATP

SEQ ID NO: 10980 - protein, 15 aa, synthetic construct
ANPAAGCAEYSCPQT

SEQ ID NO: 10981 - protein, 15 aa, synthetic construct
ANPEATFSALGTGDR

SEQ ID NO: 10982 - protein, 15 aa, synthetic construct
ANPQARGCTALYPLG

SEQ ID NO: 10983 - protein, 15 aa, synthetic construct
ANQTCWVDMWAGVEE

SEQ ID NO: 10984 - protein, 15 aa, synthetic construct
ANRTVAGTMEKDRGG

SEQ ID NO: 10985 - protein, 15 aa, synthetic construct
ANYSKLQDHFSAETP

SEQ ID NO: 10986 - protein, 15 aa, synthetic construct
APAAACVQSVAESPA

SEQ ID NO: 10987 - protein, 15 aa, synthetic construct
APAAALHRPRAPPGG

SEQ ID NO: 10988 - protein, 15 aa, synthetic construct
APAAASPAAAAPLAV

SEQ ID NO: 10989 - protein, 15 aa, synthetic construct
APAAQHRGPGRPALL

SEQ ID NO: 10990 - protein, 15 aa, synthetic construct
APAARVAWGCARPPR

SEQ ID NO: 10991 - protein, 15 aa, synthetic construct
APAASSLLQQQQQQQ

SEQ ID NO: 10992 - protein, 15 aa, synthetic construct
APAAVCPSAAANLCA

SEQ ID NO: 10993 - protein, 13 aa, synthetic construct
APADTLPAPLLAL

SEQ ID NO: 10994 - protein, 15 aa, synthetic construct
APAEAAGRLAGGDAG

SEQ ID NO: 10995 - protein, 15 aa, synthetic construct
APAGAGRAAGAGLPV

SEQ ID NO: 10996 - protein, 15 aa, synthetic construct
APAGSGAEHDNSDAQ

SEQ ID NO: 10997 - protein, 15 aa, synthetic construct
APAGSRRCSRLSPAC

SEQ ID NO: 10998 - protein, 15 aa, synthetic construct
APCASPAKAPSGRRT

SEQ ID NO: 10999 - protein, 15 aa, synthetic construct
APCSPARGPAGLPLP

SEQ ID NO: 11000 - protein, 15 aa, synthetic construct
APDAAAAAPAAAAAG

SEQ ID NO: 11001 - protein, 15 aa, synthetic construct
APDAAQDVPHAPLHP

SEQ ID NO: 11002 - protein, 15 aa, synthetic construct
APDPLPEPREPENVC

SEQ ID NO: 11003 - protein, 15 aa, synthetic construct
APDPRGAAAAAGDPR

SEQ ID NO: 11004 - protein, 15 aa, synthetic construct
APDRRGPAAASSRRL

SEQ ID NO: 11005 - protein, 15 aa, synthetic construct
APEAAGEEEGQVQGD

SEQ ID NO: 11006 - protein, 15 aa, synthetic construct
APEAEVRSSGCQSWS

SEQ ID NO: 11007 - protein, 15 aa, synthetic construct
APEAGARGAGRPGGA

SEQ ID NO: 11008 - protein, 15 aa, synthetic construct
APEAQEREAAGPAQP

SEQ ID NO: 11009 - protein, 15 aa, synthetic construct
APEETERCPAARAHQ

SEQ ID NO: 11010 - protein, 15 aa, synthetic construct
APEEVGPVLRGEPAR

SEQ ID NO: 11011 - protein, 15 aa, synthetic construct
APEGPLAVAHAAAAD

SEQ ID NO: 11012 - protein, 15 aa, synthetic construct
APENLRARSRHCARS

SEQ ID NO: 11013 - protein, 15 aa, synthetic construct
APENPRETEPSSPAG

SEQ ID NO: 11014 - protein, 12 aa, synthetic construct
APEPALGAKLWS

SEQ ID NO: 11015 - protein, 15 aa, synthetic construct
APEPCGSPAPCAARG

SEQ ID NO: 11016 - protein, 15 aa, synthetic construct
APGAAAAGPGAGRAA

SEQ ID NO: 11017 - protein, 15 aa, synthetic construct
APGARPPSLGLLRVR

SEQ ID NO: 11018 - protein, 15 aa, synthetic construct
APGASGKVLLKEKDG

SEQ ID NO: 11019 - protein, 15 aa, synthetic construct
APGASPAAARREPAL

SEQ ID NO: 11020 - protein, 15 aa, synthetic construct
APGCFVLPAVEFPDL

SEQ ID NO: 11021 - protein, 15 aa, synthetic construct
APGDCTWGPGVTAAA

SEQ ID NO: 11022 - protein, 15 aa, synthetic construct
APGEPTTTMAQDGGS

SEQ ID NO: 11023 - protein, 15 aa, synthetic construct
APGGRCQQRWLSCRE

SEQ ID NO: 11024 - protein, 15 aa, synthetic construct
APGIAFGTAPAPAPA

SEQ ID NO: 11025 - protein, 12 aa, synthetic construct
APGISERPQESF

SEQ ID NO: 11026 - protein, 15 aa, synthetic construct
APGLGRGGLGMAERA

SEQ ID NO: 11027 - protein, 15 aa, synthetic construct
APGLHHQQQQQDPRC

SEQ ID NO: 11028 - protein, 15 aa, synthetic construct
APGLLRQREPLGRLP

SEQ ID NO: 11029 - protein, 15 aa, synthetic construct
APGPGAEARGAPRAG

SEQ ID NO: 11030 - protein, 15 aa, synthetic construct
APGPGSRPPRPRGWA

SEQ ID NO: 11031 - protein, 15 aa, synthetic construct
APGPPPERPARALRH

SEQ ID NO: 11032 - protein, 15 aa, synthetic construct
APGRWPICASTPWPS

SEQ ID NO: 11033 - protein, 15 aa, synthetic construct
APGSPSTATTPRAAA

SEQ ID NO: 11034 - protein, 15 aa, synthetic construct
APGTAPRPLRRCQGR

SEQ ID NO: 11035 - protein, 15 aa, synthetic construct
APGTHHEAGPGENCP

SEQ ID NO: 11036 - protein, 15 aa, synthetic construct
APGTRAGRGGGARAR

SEQ ID NO: 11037 - protein, 15 aa, synthetic construct
APHATGRGPSAPRGH

SEQ ID NO: 11038 - protein, 15 aa, synthetic construct
APHPSAPQRAQHSVC

SEQ ID NO: 11039 - protein, 15 aa, synthetic construct
APIGAGESPETSLLN

SEQ ID NO: 11040 - protein, 14 aa, synthetic construct
APLPCSPRAGAARG

SEQ ID NO: 11041 - protein, 14 aa, synthetic construct
APLRAGFNPESHAA

SEQ ID NO: 11042 - protein, 15 aa, synthetic construct
APNWHPKQNELWCWS

SEQ ID NO: 11043 - protein, 13 aa, synthetic construct
APPDHRSGQEASE

SEQ ID NO: 11044 - protein, 15 aa, synthetic construct
APPEPKVLAPPRPLP

SEQ ID NO: 11045 - protein, 15 aa, synthetic construct
APPSALPSAPLLSAP

SEQ ID NO: 11046 - protein, 15 aa, synthetic construct
APPTGSSSMASMKGS

SEQ ID NO: 11047 - protein, 15 aa, synthetic construct
APQAGTPVARPRGPP

SEQ ID NO: 11048 - protein, 15 aa, synthetic construct
APQAQPPVPAPGPSA

SEQ ID NO: 11049 - protein, 15 aa, synthetic construct
APQCGDRPPDWASKG

SEQ ID NO: 11050 - protein, 15 aa, synthetic construct
APQGEKLDRNLAVGY

SEQ ID NO: 11051 - protein, 15 aa, synthetic construct
APQHAGERHPGHRAV

SEQ ID NO: 11052 - protein, 15 aa, synthetic construct
APQNKRCLPLQYSRS

SEQ ID NO: 11053 - protein, 15 aa, synthetic construct
APQPGPAQPRSVQGQ

SEQ ID NO: 11054 - protein, 15 aa, synthetic construct
APQPLLQRLLHQDSA

SEQ ID NO: 11055 - protein, 12 aa, synthetic construct
APQTAASAGRVP

SEQ ID NO: 11056 - protein, 15 aa, synthetic construct
APRAACAWCPNTAPS

SEQ ID NO: 11057 - protein, 15 aa, synthetic construct
APRGAMALVGVPRGA

SEQ ID NO: 11058 - protein, 15 aa, synthetic construct
APRTCTTTPSPPCSS

SEQ ID NO: 11059 - protein, 15 aa, synthetic construct
APRTLAAPLGRHPRR

SEQ ID NO: 11060 - protein, 15 aa, synthetic construct
APRTPWRRVPASCGR

SEQ ID NO: 11061 - protein, 15 aa, synthetic construct
APSAAAVSPAAALQA

SEQ ID NO: 11062 - protein, 15 aa, synthetic construct
APSAAAVSPVAPPRV

SEQ ID NO: 11063 - protein, 15 aa, synthetic construct
APSALDPHRPPDHPG

SEQ ID NO: 11064 - protein, 15 aa, synthetic construct
APSERGPCRGPKTET

SEQ ID NO: 11065 - protein, 15 aa, synthetic construct
APSGDLGHQHLPAAG

SEQ ID NO: 11066 - protein, 15 aa, synthetic construct
APSGTGWFENHGVGT

SEQ ID NO: 11067 - protein, 15 aa, synthetic construct
APSIPVQLFRGHRGL

SEQ ID NO: 11068 - protein, 15 aa, synthetic construct
APSIVCEVGRGAVPG

SEQ ID NO: 11069 - protein, 15 aa, synthetic construct
APSQLEPASPACLHS

SEQ ID NO: 11070 - protein, 15 aa, synthetic construct
APSSVLRVCPTLLPE

SEQ ID NO: 11071 - protein, 15 aa, synthetic construct
APSVPTEACCLCRPT

SEQ ID NO: 11072 - protein, 15 aa, synthetic construct
APSWTRTTTGARPSG

SEQ ID NO: 11073 - protein, 15 aa, synthetic construct
APTGATSLGLASSTR

SEQ ID NO: 11074 - protein, 15 aa, synthetic construct
APTGTPMPTCARCRR

SEQ ID NO: 11075 - protein, 15 aa, synthetic construct
APTPRPSLPAGTPGA

SEQ ID NO: 11076 - protein, 15 aa, synthetic construct
AQAAARLGAVRLQLH

SEQ ID NO: 11077 - protein, 15 aa, synthetic construct
AQAALGSQLIPFNSS

SEQ ID NO: 11078 - protein, 15 aa, synthetic construct
AQACILESGLAGERL

SEQ ID NO: 11079 - protein, 15 aa, synthetic construct
AQAGDGGAGRIRGSG

SEQ ID NO: 11080 - protein, 15 aa, synthetic construct
AQALQDRHAAARQEL

SEQ ID NO: 11081 - protein, 15 aa, synthetic construct
AQALRPAPAAGAGGR

SEQ ID NO: 11082 - protein, 15 aa, synthetic construct
AQARRHPRLLHRRLQ

SEQ ID NO: 11083 - protein, 14 aa, synthetic construct
AQCGAAAGGRACVC

SEQ ID NO: 11084 - protein, 15 aa, synthetic construct
AQCHLGGPEEHGGGH

SEQ ID NO: 11085 - protein, 15 aa, synthetic construct
AQDAGPRPPRPPLLL

SEQ ID NO: 11086 - protein, 15 aa, synthetic construct
AQDLGAGTAGSGQCC

SEQ ID NO: 11087 - protein, 15 aa, synthetic construct
AQEAAAGSRGGRGGG

SEQ ID NO: 11088 - protein, 15 aa, synthetic construct
AQEAAAVAPALRVLG

SEQ ID NO: 11089 - protein, 15 aa, synthetic construct
AQEAQLHFPDRAPAA

SEQ ID NO: 11090 - protein, 15 aa, synthetic construct
AQEEADAHPAEPGPR

SEQ ID NO: 11091 - protein, 13 aa, synthetic construct
AQEEAGAAQAPSL

SEQ ID NO: 11092 - protein, 15 aa, synthetic construct
AQEEKQELSGRSEAS

SEQ ID NO: 11093 - protein, 15 aa, synthetic construct
AQEERTPGTPGQRRR

SEQ ID NO: 11094 - protein, 15 aa, synthetic construct
AQEFQSQFPDGATPR

SEQ ID NO: 11095 - protein, 15 aa, synthetic construct
AQEKAIQCFREGETS

SEQ ID NO: 11096 - protein, 15 aa, synthetic construct
AQETDRPEGGRLRPP

SEQ ID NO: 11097 - protein, 15 aa, synthetic construct
AQGAAGRAGRGIPRD

SEQ ID NO: 11098 - protein, 12 aa, synthetic construct
AQGGEPRGRGQR

SEQ ID NO: 11099 - protein, 15 aa, synthetic construct
AQGGLPSDVHGGLQH

SEQ ID NO: 11100 - protein, 15 aa, synthetic construct
AQGGREPTAPWPRAN

SEQ ID NO: 11101 - protein, 15 aa, synthetic construct
AQGSGAAARGGESGG

SEQ ID NO: 11102 - protein, 15 aa, synthetic construct
AQLAAPDLLGLLLAA

SEQ ID NO: 11103 - protein, 15 aa, synthetic construct
AQLQPCRLCGGIAGA

SEQ ID NO: 11104 - protein, 15 aa, synthetic construct
AQLRRHLEDAQQREF

SEQ ID NO: 11105 - protein, 15 aa, synthetic construct
AQLSSTAAAAVLGCG

SEQ ID NO: 11106 - protein, 15 aa, synthetic construct
AQPAGPPASACQLQQ

SEQ ID NO: 11107 - protein, 15 aa, synthetic construct
AQPAPRPVLPAARPV

SEQ ID NO: 11108 - protein, 15 aa, synthetic construct
AQPGGAGRRQPGGGQ

SEQ ID NO: 11109 - protein, 15 aa, synthetic construct
AQPGRKCLSDSRSRL

SEQ ID NO: 11110 - protein, 15 aa, synthetic construct
AQPNPTERWCCQASR

SEQ ID NO: 11111 - protein, 15 aa, synthetic construct
AQPQDQPLFGNEGAV

SEQ ID NO: 11112 - protein, 15 aa, synthetic construct
AQPQKQQRRPQKQAR

SEQ ID NO: 11113 - protein, 15 aa, synthetic construct
AQPVSSPPAPAPCAA

SEQ ID NO: 11114 - protein, 15 aa, synthetic construct
AQPVSSPPVPAPCAV

SEQ ID NO: 11115 - protein, 15 aa, synthetic construct
AQQAGGEAPAARGQE

SEQ ID NO: 11116 - protein, 15 aa, synthetic construct
AQQHRYAGAEAGGHS

SEQ ID NO: 11117 - protein, 15 aa, synthetic construct
AQQPSPGRPAQHGRD

SEQ ID NO: 11118 - protein, 15 aa, synthetic construct
AQRAGEPLPGAGRAA

SEQ ID NO: 11119 - protein, 15 aa, synthetic construct
AQRATSAGRGAGGPR

SEQ ID NO: 11120 - protein, 15 aa, synthetic construct
AQRAWAGGAGGGDGQ

SEQ ID NO: 11121 - protein, 15 aa, synthetic construct
AQRESLPERGRGAPA

SEQ ID NO: 11122 - protein, 15 aa, synthetic construct
AQRGQPADRFSVAAA

SEQ ID NO: 11123 - protein, 15 aa, synthetic construct
AQRPGARPNRAGLGP

SEQ ID NO: 11124 - protein, 15 aa, synthetic construct
AQRQRQPQESGEAAG

SEQ ID NO: 11125 - protein, 15 aa, synthetic construct
AQRRGDGGLGRPAAP

SEQ ID NO: 11126 - protein, 15 aa, synthetic construct
AQSEAGGGDGGLRGG

SEQ ID NO: 11127 - protein, 15 aa, synthetic construct
AQSHPDARPRLSSEG

SEQ ID NO: 11128 - protein, 15 aa, synthetic construct
AQSLPGEEEEPGGLG

SEQ ID NO: 11129 - protein, 15 aa, synthetic construct
AQTAAQRELRGASGR

SEQ ID NO: 11130 - protein, 15 aa, synthetic construct
AQTEAGRRGCGRLRG

SEQ ID NO: 11131 - protein, 15 aa, synthetic construct
AQTPRAPTSPSAAAC

SEQ ID NO: 11132 - protein, 15 aa, synthetic construct
AQTQFLEKDGDSREA

SEQ ID NO: 11133 - protein, 15 aa, synthetic construct
AQTQGPVPPSGDAHL

SEQ ID NO: 11134 - protein, 15 aa, synthetic construct
AQVHRALQQVLPVPA

SEQ ID NO: 11135 - protein, 15 aa, synthetic construct
AQVPEPDEPERAGRG

SEQ ID NO: 11136 - protein, 15 aa, synthetic construct
AQVPLLRHFQHQREL

SEQ ID NO: 11137 - protein, 15 aa, synthetic construct
AQVQDVLKKDPGGRR

SEQ ID NO: 11138 - protein, 15 aa, synthetic construct
AQVSAPHVSERAEAA

SEQ ID NO: 11139 - protein, 15 aa, synthetic construct
ARAAAHAAPGAPRAR

SEQ ID NO: 11140 - protein, 15 aa, synthetic construct
ARAARPGAAPRARGA

SEQ ID NO: 11141 - protein, 15 aa, synthetic construct
ARACAGRGRGALRSR

SEQ ID NO: 11142 - protein, 15 aa, synthetic construct
ARACRGSKARPSPVA

SEQ ID NO: 11143 - protein, 15 aa, synthetic construct
ARAGAGGGREPLGGG

SEQ ID NO: 11144 - protein, 15 aa, synthetic construct
ARAGAVPAAAAADAA

SEQ ID NO: 11145 - protein, 15 aa, synthetic construct
ARAGQVCSRPEEGLQ

SEQ ID NO: 11146 - protein, 15 aa, synthetic construct
ARAGRGTPPSSSSSS

SEQ ID NO: 11147 - protein, 15 aa, synthetic construct
ARALPAGGGGLRAPP

SEQ ID NO: 11148 - protein, 15 aa, synthetic construct
ARALRLEGGAAAQLP

SEQ ID NO: 11149 - protein, 15 aa, synthetic construct
ARAPARARPATATQL

SEQ ID NO: 11150 - protein, 15 aa, synthetic construct
ARAPATRPLPPPPGT

SEQ ID NO: 11151 - protein, 15 aa, synthetic construct
ARAPGGPGHPEASPA

SEQ ID NO: 11152 - protein, 12 aa, synthetic construct
ARAPRGCWRPGP

SEQ ID NO: 11153 - protein, 15 aa, synthetic construct
ARAPRGRRGPAGGTE

SEQ ID NO: 11154 - protein, 15 aa, synthetic construct
ARAPRPARSGGRRAR

SEQ ID NO: 11155 - protein, 15 aa, synthetic construct
ARARAGPAAGPAARH

SEQ ID NO: 11156 - protein, 15 aa, synthetic construct
ARARGCAVPGGGDPH

SEQ ID NO: 11157 - protein, 15 aa, synthetic construct
ARARPGPADRFGCST

SEQ ID NO: 11158 - protein, 13 aa, synthetic construct
ARARPQDERLLAG

SEQ ID NO: 11159 - protein, 15 aa, synthetic construct
ARARTQDGEWLSDAP

SEQ ID NO: 11160 - protein, 15 aa, synthetic construct
ARASEVCSRPEKGLQ

SEQ ID NO: 11161 - protein, 15 aa, synthetic construct
ARATSSSAAGLVASG

SEQ ID NO: 11162 - protein, 15 aa, synthetic construct
ARCAPDAERLPVSPR

SEQ ID NO: 11163 - protein, 15 aa, synthetic construct
ARCPRRAAAPAAAPA

SEQ ID NO: 11164 - protein, 15 aa, synthetic construct
ARCRGRRSGRASRRP

SEQ ID NO: 11165 - protein, 15 aa, synthetic construct
ARDGADAGAFALAPE

SEQ ID NO: 11166 - protein, 15 aa, synthetic construct
ARDLRGIAGRCRETT

SEQ ID NO: 11167 - protein, 15 aa, synthetic construct
ARDPVPEGLPRLAAA

SEQ ID NO: 11168 - protein, 15 aa, synthetic construct
ARDRAHPGGPVRQPD

SEQ ID NO: 11169 - protein, 15 aa, synthetic construct
AREAPGALGPAAGGR

SEQ ID NO: 11170 - protein, 15 aa, synthetic construct
ARECGTPERGDCRGC

SEQ ID NO: 11171 - protein, 15 aa, synthetic construct
AREDLGAVPATAAGA

SEQ ID NO: 11172 - protein, 15 aa, synthetic construct
ARERQSGAGDRRGSG

SEQ ID NO: 11173 - protein, 15 aa, synthetic construct
AREVAAAGRPLPGAG

SEQ ID NO: 11174 - protein, 15 aa, synthetic construct
ARFHSGVHCDDGAAH

SEQ ID NO: 11175 - protein, 15 aa, synthetic construct
ARFRARHGRQNGHVS

SEQ ID NO: 11176 - protein, 15 aa, synthetic construct
ARGAAGPQRQAGSRE

SEQ ID NO: 11177 - protein, 15 aa, synthetic construct
ARGAARRPGRLGRAA

SEQ ID NO: 11178 - protein, 15 aa, synthetic construct
ARGAGGARGACGTGG

SEQ ID NO: 11179 - protein, 15 aa, synthetic construct
ARGAGPGVGGRAPAA

SEQ ID NO: 11180 - protein, 15 aa, synthetic construct
ARGEPAAPRGAAPGP

SEQ ID NO: 11181 - protein, 14 aa, synthetic construct
ARGEQGHAQWGRQR

SEQ ID NO: 11182 - protein, 15 aa, synthetic construct
ARGERSGGRRGSSGL

SEQ ID NO: 11183 - protein, 15 aa, synthetic construct
ARGGCGGGGQRGRHL

SEQ ID NO: 11184 - protein, 15 aa, synthetic construct
ARGGCRVPRATAAEP

SEQ ID NO: 11185 - protein, 15 aa, synthetic construct
ARGGQGGEESEPGHR

SEQ ID NO: 11186 - protein, 15 aa, synthetic construct
ARGGRRAGGGGGSGR

SEQ ID NO: 11187 - protein, 15 aa, synthetic construct
ARGGRRRPRRRLGRS

SEQ ID NO: 11188 - protein, 15 aa, synthetic construct
ARGGTSRGAGKRQSA

SEQ ID NO: 11189 - protein, 15 aa, synthetic construct
ARGLGPRRRPRRRRG

SEQ ID NO: 11190 - protein, 15 aa, synthetic construct
ARGLQHPRQCEQLQL

SEQ ID NO: 11191 - protein, 15 aa, synthetic construct
ARGLRGLLLRGPRHR

SEQ ID NO: 11192 - protein, 15 aa, synthetic construct
ARGNEGSRRAGKRGP

SEQ ID NO: 11193 - protein, 15 aa, synthetic construct
ARGPAARRGTPRDLA

SEQ ID NO: 11194 - protein, 15 aa, synthetic construct
ARGPGVARLAPGSCK

SEQ ID NO: 11195 - protein, 15 aa, synthetic construct
ARGPVRVPRVPRAVP

SEQ ID NO: 11196 - protein, 15 aa, synthetic construct
ARGPVTRRALPAEAL

SEQ ID NO: 11197 - protein, 15 aa, synthetic construct
ARGQARGPGRGSNRR

SEQ ID NO: 11198 - protein, 15 aa, synthetic construct
ARGQELRPGPHAMEE

SEQ ID NO: 11199 - protein, 15 aa, synthetic construct
ARGQREASDRSASRG

SEQ ID NO: 11200 - protein, 15 aa, synthetic construct
ARGRQLPGADRERKQ

SEQ ID NO: 11201 - protein, 15 aa, synthetic construct
ARGRRPPARRRRQWC

SEQ ID NO: 11202 - protein, 15 aa, synthetic construct
ARHAAPEPGAGFLWL

SEQ ID NO: 11203 - protein, 15 aa, synthetic construct
ARHDGERARVTGEEP

SEQ ID NO: 11204 - protein, 15 aa, synthetic construct
ARHLLPVHELLRRRG

SEQ ID NO: 11205 - protein, 15 aa, synthetic construct
ARHRRLGPEHLPPRL

SEQ ID NO: 11206 - protein, 15 aa, synthetic construct
ARKLSFSNGVPHGRG

SEQ ID NO: 11207 - protein, 15 aa, synthetic construct
ARLATPRRQGPGARG

SEQ ID NO: 11208 - protein, 15 aa, synthetic construct
ARLEAKYGSSHFSGQ

SEQ ID NO: 11209 - protein, 15 aa, synthetic construct
ARLHPGRGAADRRLR

SEQ ID NO: 11210 - protein, 15 aa, synthetic construct
ARLLTRAHVECPPAH

SEQ ID NO: 11211 - protein, 15 aa, synthetic construct
ARLPAARAALRAALA

SEQ ID NO: 11212 - protein, 15 aa, synthetic construct
ARLPGSTPGERRRRG

SEQ ID NO: 11213 - protein, 15 aa, synthetic construct
ARLQAVQPQCAREDP

SEQ ID NO: 11214 - protein, 15 aa, synthetic construct
ARLQLGWPDPPVHSH

SEQ ID NO: 11215 - protein, 13 aa, synthetic construct
ARLRRPSPRSSHD

SEQ ID NO: 11216 - protein, 15 aa, synthetic construct
ARLSHRLSRPSSFSL

SEQ ID NO: 11217 - protein, 15 aa, synthetic construct
ARLWGRPGTRCWASR

SEQ ID NO: 11218 - protein, 15 aa, synthetic construct
ARNSHLPHQPESTSR

SEQ ID NO: 11219 - protein, 15 aa, synthetic construct
ARPAAAAAAGRLRAA

SEQ ID NO: 11220 - protein, 12 aa, synthetic construct
ARPAGAGGRAFE

SEQ ID NO: 11221 - protein, 15 aa, synthetic construct
ARPAGRAARAPRGPR

SEQ ID NO: 11222 - protein, 15 aa, synthetic construct
ARPAPRSAVGAAGAL

SEQ ID NO: 11223 - protein, 15 aa, synthetic construct
ARPCEPALSGTRTRA

SEQ ID NO: 11224 - protein, 15 aa, synthetic construct
ARPFRLWGARRPALP

SEQ ID NO: 11225 - protein, 15 aa, synthetic construct
ARPGAGRAGRAGGGT

SEQ ID NO: 11226 - protein, 15 aa, synthetic construct
ARPGGARRRGRGAEE

SEQ ID NO: 11227 - protein, 15 aa, synthetic construct
ARPGGPERAPERAAP

SEQ ID NO: 11228 - protein, 15 aa, synthetic construct
ARPHAAVPQLLLHQP

SEQ ID NO: 11229 - protein, 15 aa, synthetic construct
ARPHSGPQAPGRRAA

SEQ ID NO: 11230 - protein, 15 aa, synthetic construct
ARPPATVPEPPCSAV

SEQ ID NO: 11231 - protein, 15 aa, synthetic construct
ARPQKRPDSGAGLTD

SEQ ID NO: 11232 - protein, 14 aa, synthetic construct
ARPRALAAGRDDAA

SEQ ID NO: 11233 - protein, 15 aa, synthetic construct
ARPRALTSPPCPSGS

SEQ ID NO: 11234 - protein, 15 aa, synthetic construct
ARPRECAQLTGPGSE

SEQ ID NO: 11235 - protein, 15 aa, synthetic construct
ARPRPPRTPRAMSQG

SEQ ID NO: 11236 - protein, 15 aa, synthetic construct
ARPSKWRQQRCACVQ

SEQ ID NO: 11237 - protein, 15 aa, synthetic construct
ARPSRSTWPSWGAAG

SEQ ID NO: 11238 - protein, 15 aa, synthetic construct
ARPVLPLQLDAAAAH

SEQ ID NO: 11239 - protein, 14 aa, synthetic construct
ARPVQIGSCAQEGF

SEQ ID NO: 11240 - protein, 15 aa, synthetic construct
ARQLQAEKCLQFAIY

SEQ ID NO: 11241 - protein, 15 aa, synthetic construct
ARQPHESDKQGCVYL

SEQ ID NO: 11242 - protein, 15 aa, synthetic construct
ARQPRAPRALRTPGV

SEQ ID NO: 11243 - protein, 12 aa, synthetic construct
ARQVWVPGAAPG

SEQ ID NO: 11244 - protein, 15 aa, synthetic construct
ARRAGARPGCRRPPG

SEQ ID NO: 11245 - protein, 15 aa, synthetic construct
ARRAGRGGGPRAPVH

SEQ ID NO: 11246 - protein, 15 aa, synthetic construct
ARRAPGSAPALSRLP

SEQ ID NO: 11247 - protein, 15 aa, synthetic construct
ARRCARGAALAARLG

SEQ ID NO: 11248 - protein, 15 aa, synthetic construct
ARRCGAVLQRGPWLP

SEQ ID NO: 11249 - protein, 15 aa, synthetic construct
ARREAVALRPGGAGK

SEQ ID NO: 11250 - protein, 15 aa, synthetic construct
ARRELSSSRLQSFLA

SEQ ID NO: 11251 - protein, 15 aa, synthetic construct
ARRGGDPAAGGAWCP

SEQ ID NO: 11252 - protein, 15 aa, synthetic construct
ARRGGRPGRVAAVTG

SEQ ID NO: 11253 - protein, 15 aa, synthetic construct
ARRGPPAAAARAAAA

SEQ ID NO: 11254 - protein, 15 aa, synthetic construct
ARRGPRPPRRRRARA

SEQ ID NO: 11255 - protein, 15 aa, synthetic construct
ARRGQAPARGGVAGQ

SEQ ID NO: 11256 - protein, 15 aa, synthetic construct
ARRGRGAAAARRRTA

SEQ ID NO: 11257 - protein, 15 aa, synthetic construct
ARRGRGRRRAAASAC

SEQ ID NO: 11258 - protein, 15 aa, synthetic construct
ARRGRRWPLGSGRAG

SEQ ID NO: 11259 - protein, 15 aa, synthetic construct
ARRGSWSLPPRSLRR

SEQ ID NO: 11260 - protein, 15 aa, synthetic construct
ARRIERQRGARGRRR

SEQ ID NO: 11261 - protein, 15 aa, synthetic construct
ARRKKPLCMLYHQPH

SEQ ID NO: 11262 - protein, 15 aa, synthetic construct
ARRKLEPEAGRGVGL

SEQ ID NO: 11263 - protein, 15 aa, synthetic construct
ARRLLGAARAATEDR

SEQ ID NO: 11264 - protein, 15 aa, synthetic construct
ARRLVPCRTPTRQPA

SEQ ID NO: 11265 - protein, 15 aa, synthetic construct
ARRPGPAPWQRVQVG

SEQ ID NO: 11266 - protein, 15 aa, synthetic construct
ARRPGRGPPGRTGPP

SEQ ID NO: 11267 - protein, 15 aa, synthetic construct
ARRPHRTRRRRSPGC

SEQ ID NO: 11268 - protein, 15 aa, synthetic construct
ARRPQPGHRRAPVAQ

SEQ ID NO: 11269 - protein, 15 aa, synthetic construct
ARRPQRYLDPAQQRQ

SEQ ID NO: 11270 - protein, 15 aa, synthetic construct
ARRPQSPQPRAFAAP

SEQ ID NO: 11271 - protein, 15 aa, synthetic construct
ARRPSPRAPAPGGRA

SEQ ID NO: 11272 - protein, 15 aa, synthetic construct
ARRQPGGLRHGLLHR

SEQ ID NO: 11273 - protein, 15 aa, synthetic construct
ARRQVPALRRQRAPG

SEQ ID NO: 11274 - protein, 15 aa, synthetic construct
ARRRAAGARGAPRPG

SEQ ID NO: 11275 - protein, 15 aa, synthetic construct
ARRRCGRGRRRHGRG

SEQ ID NO: 11276 - protein, 15 aa, synthetic construct
ARRRGERGVWPASHR

SEQ ID NO: 11277 - protein, 15 aa, synthetic construct
ARRRGFARRRARAPG

SEQ ID NO: 11278 - protein, 15 aa, synthetic construct
ARRRPPSRRAPPAST

SEQ ID NO: 11279 - protein, 15 aa, synthetic construct
ARRRPRWRRRWRRRA

SEQ ID NO: 11280 - protein, 15 aa, synthetic construct
ARRRTPAAASSATSG

SEQ ID NO: 11281 - protein, 15 aa, synthetic construct
ARRRTSGRTTWQKRT

SEQ ID NO: 11282 - protein, 13 aa, synthetic construct
ARRSASRGRGSQL

SEQ ID NO: 11283 - protein, 15 aa, synthetic construct
ARRSGPDPGTPCRSR

SEQ ID NO: 11284 - protein, 15 aa, synthetic construct
ARRSPGPRPDRPPEL

SEQ ID NO: 11285 - protein, 15 aa, synthetic construct
ARRTCVFFGGRGLPQ

SEQ ID NO: 11286 - protein, 15 aa, synthetic construct
ARRVTPASSPTPRPP

SEQ ID NO: 11287 - protein, 15 aa, synthetic construct
ARRWLADAVPVAGVS

SEQ ID NO: 11288 - protein, 15 aa, synthetic construct
ARSARAPAAGGRRRR

SEQ ID NO: 11289 - protein, 15 aa, synthetic construct
ARSDPGPARPSPARA

SEQ ID NO: 11290 - protein, 15 aa, synthetic construct
ARSPAPTGPERAGGQ

SEQ ID NO: 11291 - protein, 15 aa, synthetic construct
ARSPLAPRDRSAAGS

SEQ ID NO: 11292 - protein, 15 aa, synthetic construct
ARSPLSARAPGGRGD

SEQ ID NO: 11293 - protein, 15 aa, synthetic construct
ARSPRTAGRASGPAA

SEQ ID NO: 11294 - protein, 15 aa, synthetic construct
ARSPSAAVRTGSSTT

SEQ ID NO: 11295 - protein, 15 aa, synthetic construct
ARSPSASRCALQATW

SEQ ID NO: 11296 - protein, 15 aa, synthetic construct
ARSRQSASHQRECRL

SEQ ID NO: 11297 - protein, 15 aa, synthetic construct
ARSRRPGRRPRRRTC

SEQ ID NO: 11298 - protein, 15 aa, synthetic construct
ARSTTRGSSAAASSC

SEQ ID NO: 11299 - protein, 15 aa, synthetic construct
ARTCPRSCSRRRRRR

SEQ ID NO: 11300 - protein, 15 aa, synthetic construct
ARTLRCPFNGESHTA

SEQ ID NO: 11301 - protein, 15 aa, synthetic construct
ARTPRGRPGPQSAAS

SEQ ID NO: 11302 - protein, 15 aa, synthetic construct
ARTQPELCLGLATGG

SEQ ID NO: 11303 - protein, 15 aa, synthetic construct
ARTTCRRRGAPGPPG

SEQ ID NO: 11304 - protein, 15 aa, synthetic construct
ARTTMKARSTEGLWL

SEQ ID NO: 11305 - protein, 15 aa, synthetic construct
ARTTTRASASASRWC

SEQ ID NO: 11306 - protein, 15 aa, synthetic construct
ARTWSRWARRRPRRP

SEQ ID NO: 11307 - protein, 15 aa, synthetic construct
ARVALLPHAPEAVSG

SEQ ID NO: 11308 - protein, 15 aa, synthetic construct
ARVLPASEEPDQSKL

SEQ ID NO: 11309 - protein, 15 aa, synthetic construct
ARVREVRARGRRVHP

SEQ ID NO: 11310 - protein, 15 aa, synthetic construct
ARVVRARLQPPLAAG

SEQ ID NO: 11311 - protein, 15 aa, synthetic construct
ARWTARRPGCSERWT

SEQ ID NO: 11312 - protein, 15 aa, synthetic construct
ASAAAAPAALGDCAG

SEQ ID NO: 11313 - protein, 15 aa, synthetic construct
ASAAARRRDGFQSEQ

SEQ ID NO: 11314 - protein, 15 aa, synthetic construct
ASAAGGAHGACLGAG

SEQ ID NO: 11315 - protein, 15 aa, synthetic construct
ASACSSGPPAATTCC

SEQ ID NO: 11316 - protein, 15 aa, synthetic construct
ASAGLLPGGGWSGGR

SEQ ID NO: 11317 - protein, 15 aa, synthetic construct
ASAGTRTPTADAPAR

SEQ ID NO: 11318 - protein, 15 aa, synthetic construct
ASAGVGGRGPGAACG

SEQ ID NO: 11319 - protein, 15 aa, synthetic construct
ASALEPCAPAAALLG

SEQ ID NO: 11320 - protein, 15 aa, synthetic construct
ASALPDGPGSVSAGG

SEQ ID NO: 11321 - protein, 15 aa, synthetic construct
ASAPQSSPVGTGPHG

SEQ ID NO: 11322 - protein, 15 aa, synthetic construct
ASAPRDPGQQCSQAL

SEQ ID NO: 11323 - protein, 15 aa, synthetic construct
ASAPSRSTRPSRRCA

SEQ ID NO: 11324 - protein, 15 aa, synthetic construct
ASAPTKGRTGAPSFS

SEQ ID NO: 11325 - protein, 15 aa, synthetic construct
ASAPTSLTTDAGASR

SEQ ID NO: 11326 - protein, 15 aa, synthetic construct
ASAREVAVPRGAAAH

SEQ ID NO: 11327 - protein, 15 aa, synthetic construct
ASARMCAATSSAECP

SEQ ID NO: 11328 - protein, 15 aa, synthetic construct
ASARTAPSSCSPAPP

SEQ ID NO: 11329 - protein, 15 aa, synthetic construct
ASATPAGAAGPAGAG

SEQ ID NO: 11330 - protein, 15 aa, synthetic construct
ASAVRPAARGWRRPG

SEQ ID NO: 11331 - protein, 15 aa, synthetic construct
ASCALQGAAGDPERR

SEQ ID NO: 11332 - protein, 15 aa, synthetic construct
ASCCCPTARGRPASG

SEQ ID NO: 11333 - protein, 15 aa, synthetic construct
ASCCLLAHSQEFERI

SEQ ID NO: 11334 - protein, 15 aa, synthetic construct
ASCRGTRRRGTRKRK

SEQ ID NO: 11335 - protein, 15 aa, synthetic construct
ASDATLCWAGRGCGP

SEQ ID NO: 11336 - protein, 15 aa, synthetic construct
ASEAAEERALHRAGQ

SEQ ID NO: 11337 - protein, 15 aa, synthetic construct
ASEAASWLHLSPHIP

SEQ ID NO: 11338 - protein, 15 aa, synthetic construct
ASECARRRSSSAPGG

SEQ ID NO: 11339 - protein, 15 aa, synthetic construct
ASEKAAHELGTAHQP

SEQ ID NO: 11340 - protein, 15 aa, synthetic construct
ASEPLERALHRPHEL

SEQ ID NO: 11341 - protein, 15 aa, synthetic construct
ASEPRRLLPVLPATR

SEQ ID NO: 11342 - protein, 15 aa, synthetic construct
ASEVAATQGAGGAAA

SEQ ID NO: 11343 - protein, 15 aa, synthetic construct
ASFPEPGPCPGPQQR

SEQ ID NO: 11344 - protein, 15 aa, synthetic construct
ASGADEPAGAAREQR

SEQ ID NO: 11345 - protein, 15 aa, synthetic construct
ASGARPAPEPQQSRA

SEQ ID NO: 11346 - protein, 15 aa, synthetic construct
ASGERFCAGKRNFVG

SEQ ID NO: 11347 - protein, 15 aa, synthetic construct
ASGFDPSAALGLGRP

SEQ ID NO: 11348 - protein, 15 aa, synthetic construct
ASGHAGHHEGHHDRT

SEQ ID NO: 11349 - protein, 15 aa, synthetic construct
ASGRPLLPPQRREYR

SEQ ID NO: 11350 - protein, 15 aa, synthetic construct
ASGSSPAPSTSPSPS

SEQ ID NO: 11351 - protein, 15 aa, synthetic construct
ASHGLPAPGDLCLVF

SEQ ID NO: 11352 - protein, 15 aa, synthetic construct
ASHLPHDCVGKPADI

SEQ ID NO: 11353 - protein, 15 aa, synthetic construct
ASLALAAAAGAACRL

SEQ ID NO: 11354 - protein, 15 aa, synthetic construct
ASLCAASPPAAAPAA

SEQ ID NO: 11355 - protein, 15 aa, synthetic construct
ASLCKPSFKKCHYQK

SEQ ID NO: 11356 - protein, 15 aa, synthetic construct
ASLDRPGATTTQAGT

SEQ ID NO: 11357 - protein, 15 aa, synthetic construct
ASLHSLHRAQFEESE

SEQ ID NO: 11358 - protein, 15 aa, synthetic construct
ASLISFLASPQRASR

SEQ ID NO: 11359 - protein, 15 aa, synthetic construct
ASLPAAGLRPAAHAA

SEQ ID NO: 11360 - protein, 15 aa, synthetic construct
ASLPDPRELTGRPAG

SEQ ID NO: 11361 - protein, 15 aa, synthetic construct
ASLRLPDPADLCLAF

SEQ ID NO: 11362 - protein, 15 aa, synthetic construct
ASLRRAQVPAGEPAE

SEQ ID NO: 11363 - protein, 15 aa, synthetic construct
ASLSRLEESTRASGP

SEQ ID NO: 11364 - protein, 15 aa, synthetic construct
ASLTASSTCWWSSAR

SEQ ID NO: 11365 - protein, 14 aa, synthetic construct
ASNYDQGGRMEEYR

SEQ ID NO: 11366 - protein, 15 aa, synthetic construct
ASPAAAAPIAVNPAA

SEQ ID NO: 11367 - protein, 15 aa, synthetic construct
ASPARSSRGVPAWPE

SEQ ID NO: 11368 - protein, 15 aa, synthetic construct
ASPATVPQAVGHPAA

SEQ ID NO: 11369 - protein, 15 aa, synthetic construct
ASPCCSCSCPRWSCS

SEQ ID NO: 11370 - protein, 15 aa, synthetic construct
ASPGAPSGRPGQAAG

SEQ ID NO: 11371 - protein, 15 aa, synthetic construct
ASPGASLDRGFSGRG

SEQ ID NO: 11372 - protein, 15 aa, synthetic construct
ASPGPGPAAEPLPPR

SEQ ID NO: 11373 - protein, 15 aa, synthetic construct
ASPKPLGPTFARAHV

SEQ ID NO: 11374 - protein, 15 aa, synthetic construct
ASPLISAAGTPASRK

SEQ ID NO: 11375 - protein, 15 aa, synthetic construct
ASPPAAAPAAASPAA

SEQ ID NO: 11376 - protein, 15 aa, synthetic construct
ASPPVAAAAAATTAG

SEQ ID NO: 11377 - protein, 15 aa, synthetic construct
ASPSPSPSPPWSAAT

SEQ ID NO: 11378 - protein, 15 aa, synthetic construct
ASPSSSTTRCCATCT

SEQ ID NO: 11379 - protein, 12 aa, synthetic construct
ASPTAGQSAPGS

SEQ ID NO: 11380 - protein, 15 aa, synthetic construct
ASQDSPGVPGTVPHY

SEQ ID NO: 11381 - protein, 15 aa, synthetic construct
ASQGALLPQRGRGGP

SEQ ID NO: 11382 - protein, 15 aa, synthetic construct
ASQGPSARPACEPRP

SEQ ID NO: 11383 - protein, 15 aa, synthetic construct
ASQRRGGALAAGRPG

SEQ ID NO: 11384 - protein, 15 aa, synthetic construct
ASRALCTRAGGSQTP

SEQ ID NO: 11385 - protein, 15 aa, synthetic construct
ASRATITTPPRRRRR

SEQ ID NO: 11386 - protein, 15 aa, synthetic construct
ASRCCLAVRGALDGG

SEQ ID NO: 11387 - protein, 15 aa, synthetic construct
ASRCWASTPGPAATR

SEQ ID NO: 11388 - protein, 15 aa, synthetic construct
ASRGARATLASALGG

SEQ ID NO: 11389 - protein, 15 aa, synthetic construct
ASRGGRVRHQPHGPC

SEQ ID NO: 11390 - protein, 15 aa, synthetic construct
ASRGPGCLPLLELDS

SEQ ID NO: 11391 - protein, 15 aa, synthetic construct
ASRGRGGAAGARGSH

SEQ ID NO: 11392 - protein, 15 aa, synthetic construct
ASRLPLGDAFLVPKK

SEQ ID NO: 11393 - protein, 15 aa, synthetic construct
ASRPSPAASARRLVP

SEQ ID NO: 11394 - protein, 15 aa, synthetic construct
ASRPSRWPGRTRRRL

SEQ ID NO: 11395 - protein, 15 aa, synthetic construct
ASRPTACKHAPLDPS

SEQ ID NO: 11396 - protein, 15 aa, synthetic construct
ASRRTWGWSWRSWCS

SEQ ID NO: 11397 - protein, 15 aa, synthetic construct
ASRRWWRAWRVAPVV

SEQ ID NO: 11398 - protein, 15 aa, synthetic construct
ASRSCRGRRCRRTRW

SEQ ID NO: 11399 - protein, 15 aa, synthetic construct
ASRSLPTPPPSMASA

SEQ ID NO: 11400 - protein, 15 aa, synthetic construct
ASRSPRPSVVRLPLG

SEQ ID NO: 11401 - protein, 15 aa, synthetic construct
ASRSRRWPSPCARSA

SEQ ID NO: 11402 - protein, 15 aa, synthetic construct
ASRSVAPALALFPAA

SEQ ID NO: 11403 - protein, 15 aa, synthetic construct
ASRTQPRIRPAHLPP

SEQ ID NO: 11404 - protein, 15 aa, synthetic construct
ASRWPTAASCSWRCC

SEQ ID NO: 11405 - protein, 15 aa, synthetic construct
ASSAAAGSSPLRMKA

SEQ ID NO: 11406 - protein, 15 aa, synthetic construct
ASSAPAQIRKNGEFP

SEQ ID NO: 11407 - protein, 15 aa, synthetic construct
ASSAPSCPRTRPRRQ

SEQ ID NO: 11408 - protein, 15 aa, synthetic construct
ASSAQAAPAPAAAAT

SEQ ID NO: 11409 - protein, 15 aa, synthetic construct
ASSAQETRRTHGSAT

SEQ ID NO: 11410 - protein, 15 aa, synthetic construct
ASSATLPCASAGLEA

SEQ ID NO: 11411 - protein, 15 aa, synthetic construct
ASSGPESGAAGAGAG

SEQ ID NO: 11412 - protein, 15 aa, synthetic construct
ASSPAAASPAAVSPC

SEQ ID NO: 11413 - protein, 15 aa, synthetic construct
ASSPSSALAGTGPKC

SEQ ID NO: 11414 - protein, 15 aa, synthetic construct
ASSSEAVSLQHGMAV

SEQ ID NO: 11415 - protein, 15 aa, synthetic construct
ASSSTSSWQWHCFAP

SEQ ID NO: 11416 - protein, 15 aa, synthetic construct
ASTKARSAAWSPASI

SEQ ID NO: 11417 - protein, 15 aa, synthetic construct
ASTRATSCSRSWPSP

SEQ ID NO: 11418 - protein, 15 aa, synthetic construct
ASTSATARWSTSPRR

SEQ ID NO: 11419 - protein, 15 aa, synthetic construct
ASTSWASLSPTWPGA

SEQ ID NO: 11420 - protein, 15 aa, synthetic construct
ASTTGPCTNTERSSV

SEQ ID NO: 11421 - protein, 15 aa, synthetic construct
ASTTRCLTVSGCPAA

SEQ ID NO: 11422 - protein, 15 aa, synthetic construct
ASVAASGGGPEVSGS

SEQ ID NO: 11423 - protein, 15 aa, synthetic construct
ASVDLPRGLIAPSRV

SEQ ID NO: 11424 - protein, 15 aa, synthetic construct
ASVMANSSRGWNGRP

SEQ ID NO: 11425 - protein, 15 aa, synthetic construct
ASVPAHPRCPLRRGG

SEQ ID NO: 11426 - protein, 15 aa, synthetic construct
ASVPDSAAVQRHVPA

SEQ ID NO: 11427 - protein, 14 aa, synthetic construct
ASVQPPAARLGPVP

SEQ ID NO: 11428 - protein, 15 aa, synthetic construct
ASVSYAHDREHPGAG

SEQ ID NO: 11429 - protein, 15 aa, synthetic construct
ASWSRASTSSSSSRT

SEQ ID NO: 11430 - protein, 15 aa, synthetic construct
ATAAAGQLLERGERR

SEQ ID NO: 11431 - protein, 15 aa, synthetic construct
ATAAATAATPALWES

SEQ ID NO: 11432 - protein, 15 aa, synthetic construct
ATAAATPAGKSDSEI

SEQ ID NO: 11433 - protein, 15 aa, synthetic construct
ATAAPRTSAGPATAQ

SEQ ID NO: 11434 - protein, 15 aa, synthetic construct
ATAARAPATATAAAA

SEQ ID NO: 11435 - protein, 15 aa, synthetic construct
ATAAVAEAPAARAPR

SEQ ID NO: 11436 - protein, 15 aa, synthetic construct
ATAKAESRPGQGGAR

SEQ ID NO: 11437 - protein, 15 aa, synthetic construct
ATAPGPRHGADFKAQ

SEQ ID NO: 11438 - protein, 15 aa, synthetic construct
ATARPGPTRARWTPA

SEQ ID NO: 11439 - protein, 15 aa, synthetic construct
ATASIPSISCAPTGG

SEQ ID NO: 11440 - protein, 15 aa, synthetic construct
ATAVGVGGRSLGAGG

SEQ ID NO: 11441 - protein, 15 aa, synthetic construct
ATCARLSASSTRAPA

SEQ ID NO: 11442 - protein, 15 aa, synthetic construct
ATCPTTATRPTAVAA

SEQ ID NO: 11443 - protein, 12 aa, synthetic construct
ATCQDRDLCGHI

SEQ ID NO: 11444 - protein, 15 aa, synthetic construct
ATCSRELIRCEKPAG

SEQ ID NO: 11445 - protein, 15 aa, synthetic construct
ATDAAVVAAAAARSL

SEQ ID NO: 11446 - protein, 15 aa, synthetic construct
ATDSAVGGPAGPELS

SEQ ID NO: 11447 - protein, 15 aa, synthetic construct
ATEGEGLEICTYQNS

SEQ ID NO: 11448 - protein, 15 aa, synthetic construct
ATELPVGSAAASASP

SEQ ID NO: 11449 - protein, 15 aa, synthetic construct
ATESTHQPTLCPWGS

SEQ ID NO: 11450 - protein, 15 aa, synthetic construct
ATFRRPAASTSLGKS

SEQ ID NO: 11451 - protein, 15 aa, synthetic construct
ATGAAEAAGRLTQPE

SEQ ID NO: 11452 - protein, 15 aa, synthetic construct
ATGINSGHGGSCGCG

SEQ ID NO: 11453 - protein, 15 aa, synthetic construct
ATGRGTRDLPPVPAV

SEQ ID NO: 11454 - protein, 15 aa, synthetic construct
ATGRTWSRDKERKWE

SEQ ID NO: 11455 - protein, 15 aa, synthetic construct
ATGRVARAAPGPPPG

SEQ ID NO: 11456 - protein, 15 aa, synthetic construct
ATHKGPSSFQSPFVS

SEQ ID NO: 11457 - protein, 15 aa, synthetic construct
ATIRSSGRALGPRNG

SEQ ID NO: 11458 - protein, 15 aa, synthetic construct
ATLAPAPAPVSATAA

SEQ ID NO: 11459 - protein, 15 aa, synthetic construct
ATLGAANRGRALGVR

SEQ ID NO: 11460 - protein, 15 aa, synthetic construct
ATLKRPQLRPGLPAP

SEQ ID NO: 11461 - protein, 15 aa, synthetic construct
ATNRRQGRPLSPVHL

SEQ ID NO: 11462 - protein, 15 aa, synthetic construct
ATPPATTPGLTCSAI

SEQ ID NO: 11463 - protein, 15 aa, synthetic construct
ATPSPSARARPGLEP

SEQ ID NO: 11464 - protein, 15 aa, synthetic construct
ATPSSEAACRLGQPR

SEQ ID NO: 11465 - protein, 15 aa, synthetic construct
ATPTPTPTCASCAPP

SEQ ID NO: 11466 - protein, 15 aa, synthetic construct
ATRAEPPGRGDPVQA

SEQ ID NO: 11467 - protein, 15 aa, synthetic construct
ATRAHRWAGGGSSGA

SEQ ID NO: 11468 - protein, 15 aa, synthetic construct
ATRALAWPSRRCRCQ

SEQ ID NO: 11469 - protein, 15 aa, synthetic construct
ATRARLPPPDLRSAC

SEQ ID NO: 11470 - protein, 15 aa, synthetic construct
ATRGAPPGRAAHRNR

SEQ ID NO: 11471 - protein, 15 aa, synthetic construct
ATRPACRPFVRPPRP

SEQ ID NO: 11472 - protein, 15 aa, synthetic construct
ATRPGRQLRPEQPHL

SEQ ID NO: 11473 - protein, 15 aa, synthetic construct
ATRPRCATWRRSTRS

SEQ ID NO: 11474 - protein, 15 aa, synthetic construct
ATRSRPRPPARAPAL

SEQ ID NO: 11475 - protein, 15 aa, synthetic construct
ATRWPCGPPPDPRAS

SEQ ID NO: 11476 - protein, 15 aa, synthetic construct
ATSCGSCGFGTVRKR

SEQ ID NO: 11477 - protein, 15 aa, synthetic construct
ATSGGGRGGAPANPG

SEQ ID NO: 11478 - protein, 15 aa, synthetic construct
ATSHPGSPWGTQPLR

SEQ ID NO: 11479 - protein, 15 aa, synthetic construct
ATSMSWASGTRRSTA

SEQ ID NO: 11480 - protein, 15 aa, synthetic construct
ATSSPPLLPPLPHPH

SEQ ID NO: 11481 - protein, 15 aa, synthetic construct
ATSWADSPSTATTGP

SEQ ID NO: 11482 - protein, 15 aa, synthetic construct
ATTLGALALPGLGVA

SEQ ID NO: 11483 - protein, 15 aa, synthetic construct
ATVLKEPWGPRRPTR

SEQ ID NO: 11484 - protein, 15 aa, synthetic construct
AVAAAAGEGGGGAGG

SEQ ID NO: 11485 - protein, 15 aa, synthetic construct
AVAAAAGLSSSPCSA

SEQ ID NO: 11486 - protein, 15 aa, synthetic construct
AVAAAARARARARAL

SEQ ID NO: 11487 - protein, 15 aa, synthetic construct
AVAAAGAAGPGRPPP

SEQ ID NO: 11488 - protein, 15 aa, synthetic construct
AVAAAGGGRVGGAGL

SEQ ID NO: 11489 - protein, 15 aa, synthetic construct
AVAAPGERGRAGREP

SEQ ID NO: 11490 - protein, 15 aa, synthetic construct
AVAARGPPLAGGHAD

SEQ ID NO: 11491 - protein, 15 aa, synthetic construct
AVAARPGEALPGRAG

SEQ ID NO: 11492 - protein, 15 aa, synthetic construct
AVAGGPPVRGAQGPA

SEQ ID NO: 11493 - protein, 15 aa, synthetic construct
AVAMAVDTALAVDMA

SEQ ID NO: 11494 - protein, 15 aa, synthetic construct
AVAPAAAGLAPAGAP

SEQ ID NO: 11495 - protein, 15 aa, synthetic construct
AVAPAAPLLGGRADL

SEQ ID NO: 11496 - protein, 15 aa, synthetic construct
AVAPAVGAVAPAMGA

SEQ ID NO: 11497 - protein, 15 aa, synthetic construct
AVAPAVGAVAPAVEA

SEQ ID NO: 11498 - protein, 15 aa, synthetic construct
AVAPRAVRPPRCGAR

SEQ ID NO: 11499 - protein, 15 aa, synthetic construct
AVARGVRGNLAKLPK

SEQ ID NO: 11500 - protein, 15 aa, synthetic construct
AVATTASHPPGMGPE

SEQ ID NO: 11501 - protein, 15 aa, synthetic construct
AVAVANDGSGAGNVG

SEQ ID NO: 11502 - protein, 15 aa, synthetic construct
AVCPAPPAQPPGGHQ

SEQ ID NO: 11503 - protein, 15 aa, synthetic construct
AVCQPVPAPAVAPVG

SEQ ID NO: 11504 - protein, 15 aa, synthetic construct
AVEGKGQKERQEQRQ

SEQ ID NO: 11505 - protein, 15 aa, synthetic construct
AVELRERRTAPHAWG

SEQ ID NO: 11506 - protein, 15 aa, synthetic construct
AVFFVGRGDAGLYIC

SEQ ID NO: 11507 - protein, 15 aa, synthetic construct
AVFKPCFLHISQPRW

SEQ ID NO: 11508 - protein, 15 aa, synthetic construct
AVFPVCLPLTGDAGE

SEQ ID NO: 11509 - protein, 15 aa, synthetic construct
AVGAGGRAAGRVPAA

SEQ ID NO: 11510 - protein, 12 aa, synthetic construct
AVGEDLQAAPHL

SEQ ID NO: 11511 - protein, 15 aa, synthetic construct
AVGFSPKKTPLPPEG

SEQ ID NO: 11512 - protein, 15 aa, synthetic construct
AVGGAQAQAGAGAEA

SEQ ID NO: 11513 - protein, 15 aa, synthetic construct
AVGGCGRGAAGAPAA

SEQ ID NO: 11514 - protein, 15 aa, synthetic construct
AVGHPAASAAAASPT

SEQ ID NO: 11515 - protein, 15 aa, synthetic construct
AVGHPAASPAAVSPA

SEQ ID NO: 11516 - protein, 15 aa, synthetic construct
AVGLGTSIPRQQHAP

SEQ ID NO: 11517 - protein, 13 aa, synthetic construct
AVGSEKEEKKGNL

SEQ ID NO: 11518 - protein, 15 aa, synthetic construct
AVGSPTLPPAPHCAA

SEQ ID NO: 11519 - protein, 15 aa, synthetic construct
AVGWEWPGRSQGGSR

SEQ ID NO: 11520 - protein, 15 aa, synthetic construct
AVLAAADGPREGRAP

SEQ ID NO: 11521 - protein, 15 aa, synthetic construct
AVLLQAPLQAHQPFA

SEQ ID NO: 11522 - protein, 15 aa, synthetic construct
AVLPEGNGFRPLPLG

SEQ ID NO: 11523 - protein, 15 aa, synthetic construct
AVLPGSGSLVLPGLL

SEQ ID NO: 11524 - protein, 15 aa, synthetic construct
AVLQAGHGEAAPSAY

SEQ ID NO: 11525 - protein, 15 aa, synthetic construct
AVLQRQRAPAGRRAR

SEQ ID NO: 11526 - protein, 15 aa, synthetic construct
AVPAAASPAAATPLA

SEQ ID NO: 11527 - protein, 15 aa, synthetic construct
AVPAPAAPAGRTRRA

SEQ ID NO: 11528 - protein, 15 aa, synthetic construct
AVPAPAGPGWSPPHP

SEQ ID NO: 11529 - protein, 15 aa, synthetic construct
AVPATRTRAALGAAG

SEQ ID NO: 11530 - protein, 15 aa, synthetic construct
AVPEGGGRGSRRGGG

SEQ ID NO: 11531 - protein, 15 aa, synthetic construct
AVPGADPTHPPLRRQ

SEQ ID NO: 11532 - protein, 15 aa, synthetic construct
AVPGAGHEFARQPSA

SEQ ID NO: 11533 - protein, 15 aa, synthetic construct
AVPGGAAELRRGPLP

SEQ ID NO: 11534 - protein, 15 aa, synthetic construct
AVPGGERGRQAQSAS

SEQ ID NO: 11535 - protein, 15 aa, synthetic construct
AVPGRRPALSPPRQS

SEQ ID NO: 11536 - protein, 15 aa, synthetic construct
AVPGRRPALSPPSQS

SEQ ID NO: 11537 - protein, 15 aa, synthetic construct
AVPHGPRLHLLEERH

SEQ ID NO: 11538 - protein, 15 aa, synthetic construct
AVPPAHPGRGPGLWC

SEQ ID NO: 11539 - protein, 15 aa, synthetic construct
AVPPGDGGVDVPGHL

SEQ ID NO: 11540 - protein, 15 aa, synthetic construct
AVPQGSGSVPGPVGL

SEQ ID NO: 11541 - protein, 15 aa, synthetic construct
AVPRAAHEFPRQPSA

SEQ ID NO: 11542 - protein, 15 aa, synthetic construct
AVPRPGAGTGQGLGA

SEQ ID NO: 11543 - protein, 15 aa, synthetic construct
AVPSVAAMAAEPEAA

SEQ ID NO: 11544 - protein, 14 aa, synthetic construct
AVPSVPRRVPRRDR

SEQ ID NO: 11545 - protein, 15 aa, synthetic construct
AVPTVREAHARACAG

SEQ ID NO: 11546 - protein, 15 aa, synthetic construct
AVPWLRGRGEGAEEG

SEQ ID NO: 11547 - protein, 15 aa, synthetic construct
AVQADQGGGAEAEDP

SEQ ID NO: 11548 - protein, 15 aa, synthetic construct
AVQGPAAVCAGLRTQ

SEQ ID NO: 11549 - protein, 15 aa, synthetic construct
AVQGPRAPARLLASP

SEQ ID NO: 11550 - protein, 15 aa, synthetic construct
AVQGVRLAAGTATGP

SEQ ID NO: 11551 - protein, 15 aa, synthetic construct
AVQREGAAGSVPAAG

SEQ ID NO: 11552 - protein, 15 aa, synthetic construct
AVRAAAPTSSPRPGL

SEQ ID NO: 11553 - protein, 15 aa, synthetic construct
AVRGAALGELSEPAW

SEQ ID NO: 11554 - protein, 15 aa, synthetic construct
AVRPAARTRRRAQGE

SEQ ID NO: 11555 - protein, 15 aa, synthetic construct
AVRPLEALPPPARGA

SEQ ID NO: 11556 - protein, 15 aa, synthetic construct
AVRPRLLRRLRAALG

SEQ ID NO: 11557 - protein, 15 aa, synthetic construct
AVRPVPPLALAALGV

SEQ ID NO: 11558 - protein, 15 aa, synthetic construct
AVRQAVQAAAHQAGL

SEQ ID NO: 11559 - protein, 14 aa, synthetic construct
AVRQPAYRADHGAH

SEQ ID NO: 11560 - protein, 15 aa, synthetic construct
AVRRHLPGLDRPELL

SEQ ID NO: 11561 - protein, 15 aa, synthetic construct
AVRRKAGRLGSQSSS

SEQ ID NO: 11562 - protein, 15 aa, synthetic construct
AVRRQPWAALRPHPH

SEQ ID NO: 11563 - protein, 15 aa, synthetic construct
AVRTTAARARRRRKR

SEQ ID NO: 11564 - protein, 15 aa, synthetic construct
AVRWAGGDAQPQPHR

SEQ ID NO: 11565 - protein, 15 aa, synthetic construct
AVSAVSAASSSSPRW

SEQ ID NO: 11566 - protein, 15 aa, synthetic construct
AVSLWSGGWGQEEDG

SEQ ID NO: 11567 - protein, 15 aa, synthetic construct
AVSMPGIYSKEQGGS

SEQ ID NO: 11568 - protein, 15 aa, synthetic construct
AVSSCPRRTLSSFCR

SEQ ID NO: 11569 - protein, 15 aa, synthetic construct
AVTAAAAGAPAPPAC

SEQ ID NO: 11570 - protein, 15 aa, synthetic construct
AVTAPGTLPGGLRHR

SEQ ID NO: 11571 - protein, 15 aa, synthetic construct
AVTPAVGAVALAAGA

SEQ ID NO: 11572 - protein, 15 aa, synthetic construct
AVVEEKKVPVAGTVS

SEQ ID NO: 11573 - protein, 12 aa, synthetic construct
AVWAQPGDPWRG

SEQ ID NO: 11574 - protein, 15 aa, synthetic construct
AVWEWRVVTAHESGC

SEQ ID NO: 11575 - protein, 15 aa, synthetic construct
AVWGGLAQPPAGNRA

SEQ ID NO: 11576 - protein, 15 aa, synthetic construct
AVWVSRRRHASAAAT

SEQ ID NO: 11577 - protein, 15 aa, synthetic construct
AVYTADRGAAVRLLS

SEQ ID NO: 11578 - protein, 15 aa, synthetic construct
AWAPICAICCVPGPD

SEQ ID NO: 11579 - protein, 15 aa, synthetic construct
AWAVAAAAADAERGA

SEQ ID NO: 11580 - protein, 15 aa, synthetic construct
AWEDGRDPWSLKYTL

SEQ ID NO: 11581 - protein, 15 aa, synthetic construct
AWEEGAQERSTEPRA

SEQ ID NO: 11582 - protein, 15 aa, synthetic construct
AWETPLGGHYGAGST

SEQ ID NO: 11583 - protein, 15 aa, synthetic construct
AWGTGPQRASAGSPG

SEQ ID NO: 11584 - protein, 15 aa, synthetic construct
AWLRLQVPGEAQATA

SEQ ID NO: 11585 - protein, 15 aa, synthetic construct
AWNNSASVWKAAASV

SEQ ID NO: 11586 - protein, 15 aa, synthetic construct
AWPCRRARPGRARWT

SEQ ID NO: 11587 - protein, 15 aa, synthetic construct
AWPRRGALPARAADQ

SEQ ID NO: 11588 - protein, 15 aa, synthetic construct
AWPSAAGPVAAMAPL

SEQ ID NO: 11589 - protein, 15 aa, synthetic construct
AWQEAPAGGRACSPG

SEQ ID NO: 11590 - protein, 15 aa, synthetic construct
AWQPLASREAPFGCL

SEQ ID NO: 11591 - protein, 15 aa, synthetic construct
AWSKPTAPAFPSSPT

SEQ ID NO: 11592 - protein, 15 aa, synthetic construct
AWSPRARKSRLRLAP

SEQ ID NO: 11593 - protein, 12 aa, synthetic construct
AWSSPLACSPPA

SEQ ID NO: 11594 - protein, 15 aa, synthetic construct
AWTQSVGEISLEKPS

SEQ ID NO: 11595 - protein, 15 aa, synthetic construct
AWVAHVEELALAAAV

SEQ ID NO: 11596 - protein, 15 aa, synthetic construct
AYSRRSEHQPALQPP

SEQ ID NO: 11597 - protein, 15 aa, synthetic construct
CAAACGSRCSARCPG

SEQ ID NO: 11598 - protein, 15 aa, synthetic construct
CAACRTSSLPATPSS

SEQ ID NO: 11599 - protein, 14 aa, synthetic construct
CAAEGMRAAHRPWE

SEQ ID NO: 11600 - protein, 15 aa, synthetic construct
CAAITCQPRCPPSCP

SEQ ID NO: 11601 - protein, 15 aa, synthetic construct
CAAPAETTPSTCVAR

SEQ ID NO: 11602 - protein, 15 aa, synthetic construct
CAAPGSSRGARRRRR

SEQ ID NO: 11603 - protein, 15 aa, synthetic construct
CAASPAAASPVAASP

SEQ ID NO: 11604 - protein, 15 aa, synthetic construct
CAASVRSEALNPDLQ

SEQ ID NO: 11605 - protein, 15 aa, synthetic construct
CAAWPCSSSLAWICF

SEQ ID NO: 11606 - protein, 15 aa, synthetic construct
CACLPGNDVNPSSSR

SEQ ID NO: 11607 - protein, 15 aa, synthetic construct
CADRGREAGVREAPR

SEQ ID NO: 11608 - protein, 15 aa, synthetic construct
CAEDLGPPVAAASRH

SEQ ID NO: 11609 - protein, 15 aa, synthetic construct
CAEKIGQSENEPCLL

SEQ ID NO: 11610 - protein, 15 aa, synthetic construct
CAGRDLAGRGKEAER

SEQ ID NO: 11611 - protein, 15 aa, synthetic construct
CAKDALPASSLNPRL

SEQ ID NO: 11612 - protein, 15 aa, synthetic construct
CALPGGPAAPPSPAR

SEQ ID NO: 11613 - protein, 15 aa, synthetic construct
CALSWLGRWTAAVFW

SEQ ID NO: 11614 - protein, 15 aa, synthetic construct
CAMATAVDVAASADW

SEQ ID NO: 11615 - protein, 15 aa, synthetic construct
CAPAAATTTCCACVT

SEQ ID NO: 11616 - protein, 15 aa, synthetic construct
CAPAGEGSCSESARI

SEQ ID NO: 11617 - protein, 12 aa, synthetic construct
CAPAPALASEQP

SEQ ID NO: 11618 - protein, 15 aa, synthetic construct
CAPEVGIRVWLWNCY

SEQ ID NO: 11619 - protein, 15 aa, synthetic construct
CAPGPRPPDSRAPRC

SEQ ID NO: 11620 - protein, 15 aa, synthetic construct
CAPPLSWLFCSAPGK

SEQ ID NO: 11621 - protein, 15 aa, synthetic construct
CAPPRGAPVAVDAVA

SEQ ID NO: 11622 - protein, 15 aa, synthetic construct
CAPQLPGREGDGGVG

SEQ ID NO: 11623 - protein, 15 aa, synthetic construct
CAPRRCCCCWPPARR

SEQ ID NO: 11624 - protein, 15 aa, synthetic construct
CAPRSSPPAEEPLIS

SEQ ID NO: 11625 - protein, 15 aa, synthetic construct
CAPTVPGDPGRLLCA

SEQ ID NO: 11626 - protein, 15 aa, synthetic construct
CAPVQRPGPGPGPLP

SEQ ID NO: 11627 - protein, 15 aa, synthetic construct
CAQPGSCCGAATAGN

SEQ ID NO: 11628 - protein, 15 aa, synthetic construct
CARGWPVAQQRPLGG

SEQ ID NO: 11629 - protein, 15 aa, synthetic construct
CARMASHFPNTPLNR

SEQ ID NO: 11630 - protein, 15 aa, synthetic construct
CARRGWAGAARGAGS

SEQ ID NO: 11631 - protein, 15 aa, synthetic construct
CARRRLFRHRGASWS

SEQ ID NO: 11632 - protein, 15 aa, synthetic construct
CARRTRACPVGAAAM

SEQ ID NO: 11633 - protein, 12 aa, synthetic construct
CARWRAAGKGAE

SEQ ID NO: 11634 - protein, 15 aa, synthetic construct
CASAATCASRSMATS

SEQ ID NO: 11635 - protein, 12 aa, synthetic construct
CASCTVSGTLWG

SEQ ID NO: 11636 - protein, 15 aa, synthetic construct
CASGNSSFSPRHVSV

SEQ ID NO: 11637 - protein, 15 aa, synthetic construct
CAVHAGATGDPAACR

SEQ ID NO: 11638 - protein, 15 aa, synthetic construct
CAWPRVGQPRGPPDL

SEQ ID NO: 11639 - protein, 15 aa, synthetic construct
CCAERGRRGQARRAT

SEQ ID NO: 11640 - protein, 15 aa, synthetic construct
CCAGCGTSCCPPRPA

SEQ ID NO: 11641 - protein, 15 aa, synthetic construct
CCALPPASGPAWAAA

SEQ ID NO: 11642 - protein, 15 aa, synthetic construct
CCAWNIYGPSSFQEA

SEQ ID NO: 11643 - protein, 15 aa, synthetic construct
CCCCCACSGARQTRP

SEQ ID NO: 11644 - protein, 15 aa, synthetic construct
CCCCCCCCCSSSILR

SEQ ID NO: 11645 - protein, 15 aa, synthetic construct
CCCCCCCCPCSGGQR

SEQ ID NO: 11646 - protein, 15 aa, synthetic construct
CCCCCCCRHCCCWRG

SEQ ID NO: 11647 - protein, 15 aa, synthetic construct
CCCCRLGLSGPRCRP

SEQ ID NO: 11648 - protein, 12 aa, synthetic construct
CCCGGWSREAGR

SEQ ID NO: 11649 - protein, 15 aa, synthetic construct
CCCGRCGAGPPGRCA

SEQ ID NO: 11650 - protein, 15 aa, synthetic construct
CCCLWRPGPGAGRGA

SEQ ID NO: 11651 - protein, 15 aa, synthetic construct
CCCPATGCWMPPSVM

SEQ ID NO: 11652 - protein, 15 aa, synthetic construct
CCCRRPRSAAPCCPA

SEQ ID NO: 11653 - protein, 15 aa, synthetic construct
CCEADGAGSLAGTAG

SEQ ID NO: 11654 - protein, 15 aa, synthetic construct
CCEPRGSSRARPPAA

SEQ ID NO: 11655 - protein, 15 aa, synthetic construct
CCEQRAAAPGRPPDR

SEQ ID NO: 11656 - protein, 15 aa, synthetic construct
CCGFRERGEERKPLS

SEQ ID NO: 11657 - protein, 15 aa, synthetic construct
CCGLGGSGARRRWRC

SEQ ID NO: 11658 - protein, 15 aa, synthetic construct
CCGRQGSGAYVGDLG

SEQ ID NO: 11659 - protein, 15 aa, synthetic construct
CCPAPSRFRGSRCPA

SEQ ID NO: 11660 - protein, 15 aa, synthetic construct
CCPLSEWQQLPQEEQ

SEQ ID NO: 11661 - protein, 15 aa, synthetic construct
CCPPRCSAARDLAAS

SEQ ID NO: 11662 - protein, 15 aa, synthetic construct
CCPRAAPACSRPTCC

SEQ ID NO: 11663 - protein, 12 aa, synthetic construct
CCQRTQEALQML

SEQ ID NO: 11664 - protein, 15 aa, synthetic construct
CCRCCRGSCCSWRPR

SEQ ID NO: 11665 - protein, 15 aa, synthetic construct
CCREWAAPRCRCRRR

SEQ ID NO: 11666 - protein, 15 aa, synthetic construct
CCRPYPPASGCCCCC

SEQ ID NO: 11667 - protein, 15 aa, synthetic construct
CCSAPGGRYGAGAGG

SEQ ID NO: 11668 - protein, 15 aa, synthetic construct
CCSGDPPAVPARGRA

SEQ ID NO: 11669 - protein, 15 aa, synthetic construct
CCTRSCCPRSSFSSL

SEQ ID NO: 11670 - protein, 15 aa, synthetic construct
CCWLQPQEDAASSRG

SEQ ID NO: 11671 - protein, 15 aa, synthetic construct
CDDLHPWAPRRPQGL

SEQ ID NO: 11672 - protein, 15 aa, synthetic construct
CDGLDVCLAAEEEQG

SEQ ID NO: 11673 - protein, 15 aa, synthetic construct
CDGLDVSLAAEEEQG

SEQ ID NO: 11674 - protein, 15 aa, synthetic construct
CDLFERTHQVREARG

SEQ ID NO: 11675 - protein, 14 aa, synthetic construct
CDPPRGGDAPRPPP

SEQ ID NO: 11676 - protein, 15 aa, synthetic construct
CDRQGSSPPAPSGPS

SEQ ID NO: 11677 - protein, 15 aa, synthetic construct
CDSRTLEGAASGSPQ

SEQ ID NO: 11678 - protein, 15 aa, synthetic construct
CEAASGGHSSSGPAA

SEQ ID NO: 11679 - protein, 15 aa, synthetic construct
CEAHRDGDPGARDLP

SEQ ID NO: 11680 - protein, 15 aa, synthetic construct
CEAPLPGRCGCSSHR

SEQ ID NO: 11681 - protein, 15 aa, synthetic construct
CEKAEEEGGREGARS

SEQ ID NO: 11682 - protein, 12 aa, synthetic construct
CELQREPDLQRQ

SEQ ID NO: 11683 - protein, 15 aa, synthetic construct
CEPANSLQACSAGPE

SEQ ID NO: 11684 - protein, 15 aa, synthetic construct
CEPPRASAAASACCS

SEQ ID NO: 11685 - protein, 15 aa, synthetic construct
CEPRQVPRSPTKMEM

SEQ ID NO: 11686 - protein, 15 aa, synthetic construct
CERGRGPGRSGRLCW

SEQ ID NO: 11687 - protein, 15 aa, synthetic construct
CERLGDRDHGPGRGA

SEQ ID NO: 11688 - protein, 15 aa, synthetic construct
CFCSFWFRCCGPRLR

SEQ ID NO: 11689 - protein, 12 aa, synthetic construct
CFICPCPDPEER

SEQ ID NO: 11690 - protein, 15 aa, synthetic construct
CFREEGQKEDWETPE

SEQ ID NO: 11691 - protein, 15 aa, synthetic construct
CFWPWSLPLPCSCAP

SEQ ID NO: 11692 - protein, 15 aa, synthetic construct
CGAAIAWRVLGEAGR

SEQ ID NO: 11693 - protein, 15 aa, synthetic construct
CGAAQPGDPARRPQG

SEQ ID NO: 11694 - protein, 15 aa, synthetic construct
CGAARWGCRAGCCTP

SEQ ID NO: 11695 - protein, 15 aa, synthetic construct
CGAGPGKLASRSRRC

SEQ ID NO: 11696 - protein, 15 aa, synthetic construct
CGAGQPAGLADTGIC

SEQ ID NO: 11697 - protein, 15 aa, synthetic construct
CGAKQGLWGCPPAPG

SEQ ID NO: 11698 - protein, 15 aa, synthetic construct
CGALPGRGLGRCCCC

SEQ ID NO: 11699 - protein, 15 aa, synthetic construct
CGATWTPSPRSAEAR

SEQ ID NO: 11700 - protein, 15 aa, synthetic construct
CGCKTASPRSSSQKA

SEQ ID NO: 11701 - protein, 13 aa, synthetic construct
CGCLGLCCFSGSQ

SEQ ID NO: 11702 - protein, 15 aa, synthetic construct
CGCRRRACGCTRLTS

SEQ ID NO: 11703 - protein, 15 aa, synthetic construct
CGCWHWRRPRCWRGL

SEQ ID NO: 11704 - protein, 15 aa, synthetic construct
CGDFLALPDAGPGSL

SEQ ID NO: 11705 - protein, 15 aa, synthetic construct
CGDGNIRGHPEEPGE

SEQ ID NO: 11706 - protein, 15 aa, synthetic construct
CGDGSCSSPEGTGTC

SEQ ID NO: 11707 - protein, 15 aa, synthetic construct
CGDRGALRPPSCAGR

SEQ ID NO: 11708 - protein, 15 aa, synthetic construct
CGDSGPGAPTGGCCW

SEQ ID NO: 11709 - protein, 15 aa, synthetic construct
CGEAGRWLCLGGCGA

SEQ ID NO: 11710 - protein, 15 aa, synthetic construct
CGFGQRSPAHQEPNR

SEQ ID NO: 11711 - protein, 15 aa, synthetic construct
CGGAASGCGTGDAVS

SEQ ID NO: 11712 - protein, 15 aa, synthetic construct
CGGAGGRGGRGARQG

SEQ ID NO: 11713 - protein, 15 aa, synthetic construct
CGGARRAGADAGRPG

SEQ ID NO: 11714 - protein, 15 aa, synthetic construct
CGGASAGTPEVRGPS

SEQ ID NO: 11715 - protein, 15 aa, synthetic construct
CGGGAGARVSTLPPR

SEQ ID NO: 11716 - protein, 15 aa, synthetic construct
CGGGSGPSSSASSQQ

SEQ ID NO: 11717 - protein, 15 aa, synthetic construct
CGISRRRSSCPRPLA

SEQ ID NO: 11718 - protein, 14 aa, synthetic construct
CGLSSPSCWSRWCC

SEQ ID NO: 11719 - protein, 15 aa, synthetic construct
CGMPSLEHPGCPRVD

SEQ ID NO: 11720 - protein, 15 aa, synthetic construct
CGPCPLAAVLCSDGA

SEQ ID NO: 11721 - protein, 15 aa, synthetic construct
CGPDCSFGPPVSRSC

SEQ ID NO: 11722 - protein, 15 aa, synthetic construct
CGPEAPVAAGGHRVP

SEQ ID NO: 11723 - protein, 15 aa, synthetic construct
CGPEAVGRRGAGRPR

SEQ ID NO: 11724 - protein, 15 aa, synthetic construct
CGPGLEPPGGGQDNR

SEQ ID NO: 11725 - protein, 15 aa, synthetic construct
CGPMCSTSARNTNSS

SEQ ID NO: 11726 - protein, 15 aa, synthetic construct
CGPPSLNLFSQDLSP

SEQ ID NO: 11727 - protein, 15 aa, synthetic construct
CGPRRRGCARRVRGR

SEQ ID NO: 11728 - protein, 15 aa, synthetic construct
CGPSRAALSSHPRLR

SEQ ID NO: 11729 - protein, 15 aa, synthetic construct
CGQGFQVRASLHNSG

SEQ ID NO: 11730 - protein, 15 aa, synthetic construct
CGQPRGRLGEAPGDG

SEQ ID NO: 11731 - protein, 15 aa, synthetic construct
CGRPAGPGPPDAGNS

SEQ ID NO: 11732 - protein, 15 aa, synthetic construct
CGRRAGGAFPGGCCC

SEQ ID NO: 11733 - protein, 15 aa, synthetic construct
CGRREAPTARRGLSA

SEQ ID NO: 11734 - protein, 15 aa, synthetic construct
CGRRRGGAPGPRGQA

SEQ ID NO: 11735 - protein, 15 aa, synthetic construct
CGRSACPGTFCSHPS

SEQ ID NO: 11736 - protein, 15 aa, synthetic construct
CGRSPEAAAAAARCG

SEQ ID NO: 11737 - protein, 15 aa, synthetic construct
CGSASGRRRCCCCCR

SEQ ID NO: 11738 - protein, 15 aa, synthetic construct
CGSPDGPGPACPGAG

SEQ ID NO: 11739 - protein, 15 aa, synthetic construct
CGSRRSGPRSRRRTR

SEQ ID NO: 11740 - protein, 15 aa, synthetic construct
CGSWRPEPSSCCSRE

SEQ ID NO: 11741 - protein, 15 aa, synthetic construct
CGTRMQTQAEALTAG

SEQ ID NO: 11742 - protein, 15 aa, synthetic construct
CGVETCSSHLRHLFV

SEQ ID NO: 11743 - protein, 15 aa, synthetic construct
CGWARGPRRWGCCCC

SEQ ID NO: 11744 - protein, 15 aa, synthetic construct
CGWRCSGPWGSWARA

SEQ ID NO: 11745 - protein, 15 aa, synthetic construct
CHCPPASCCCCSPGP

SEQ ID NO: 11746 - protein, 15 aa, synthetic construct
CHLHTQLQSTCSQMP

SEQ ID NO: 11747 - protein, 15 aa, synthetic construct
CHVWQAQEQMSMSYC

SEQ ID NO: 11748 - protein, 15 aa, synthetic construct
CIAVLSAPAASPPAL

SEQ ID NO: 11749 - protein, 15 aa, synthetic construct
CICQDSCRFMPFGLR

SEQ ID NO: 11750 - protein, 15 aa, synthetic construct
CIHHPHSLAVSKAAA

SEQ ID NO: 11751 - protein, 15 aa, synthetic construct
CIHLWQDPYSSQYLA

SEQ ID NO: 11752 - protein, 15 aa, synthetic construct
CIRAWPWPPTTGRPP

SEQ ID NO: 11753 - protein, 15 aa, synthetic construct
CITEQQPTYRTREAT

SEQ ID NO: 11754 - protein, 12 aa, synthetic construct
CKDRAGEEEPAK

SEQ ID NO: 11755 - protein, 15 aa, synthetic construct
CKTTGEVPPRSSGQP

SEQ ID NO: 11756 - protein, 15 aa, synthetic construct
CLAARREGIGKREEE

SEQ ID NO: 11757 - protein, 15 aa, synthetic construct
CLAELPAMPATAHGS

SEQ ID NO: 11758 - protein, 14 aa, synthetic construct
CLAGSAVSPLGASD

SEQ ID NO: 11759 - protein, 15 aa, synthetic construct
CLDPECGGNISGEAL

SEQ ID NO: 11760 - protein, 15 aa, synthetic construct
CLDSGGRRMARPGAA

SEQ ID NO: 11761 - protein, 15 aa, synthetic construct
CLDVASREAKPALRP

SEQ ID NO: 11762 - protein, 15 aa, synthetic construct
CLDVESKAAKLGQKL

SEQ ID NO: 11763 - protein, 15 aa, synthetic construct
CLDVVSKEAKLAPKR

SEQ ID NO: 11764 - protein, 15 aa, synthetic construct
CLEGRFRPSPSAPWA

SEQ ID NO: 11765 - protein, 15 aa, synthetic construct
CLFGARPEKALGKAV

SEQ ID NO: 11766 - protein, 15 aa, synthetic construct
CLGDERVGAAVMREP

SEQ ID NO: 11767 - protein, 13 aa, synthetic construct
CLGEAAARPPGQP

SEQ ID NO: 11768 - protein, 14 aa, synthetic construct
CLGFRKASNGVEAA

SEQ ID NO: 11769 - protein, 15 aa, synthetic construct
CLGGERGPEEPLSAP

SEQ ID NO: 11770 - protein, 15 aa, synthetic construct
CLGLGGDSSGSIASL

SEQ ID NO: 11771 - protein, 15 aa, synthetic construct
CLGVQESSKLCLPPS

SEQ ID NO: 11772 - protein, 15 aa, synthetic construct
CLHGVVPRAAAQDGP

SEQ ID NO: 11773 - protein, 15 aa, synthetic construct
CLKQCLPPPPLLLLL

SEQ ID NO: 11774 - protein, 15 aa, synthetic construct
CLLCQPPLQPPPPTP

SEQ ID NO: 11775 - protein, 15 aa, synthetic construct
CLLSPLPARLGGASA

SEQ ID NO: 11776 - protein, 15 aa, synthetic construct
CLLVTAPWQLNQENS

SEQ ID NO: 11777 - protein, 15 aa, synthetic construct
CLMNTKPRSGCRLGR

SEQ ID NO: 11778 - protein, 15 aa, synthetic construct
CLNTVTSATRESFLV

SEQ ID NO: 11779 - protein, 15 aa, synthetic construct
CLPLATEEDSVNTNP

SEQ ID NO: 11780 - protein, 15 aa, synthetic construct
CLPPQDPPVVSCSPC

SEQ ID NO: 11781 - protein, 15 aa, synthetic construct
CLPQGTDTRPKGTRR

SEQ ID NO: 11782 - protein, 15 aa, synthetic construct
CLPQMKRRSVSGHVG

SEQ ID NO: 11783 - protein, 15 aa, synthetic construct
CLPSESPWPCWCGRP

SEQ ID NO: 11784 - protein, 14 aa, synthetic construct
CLPTPLSTAFVKTR

SEQ ID NO: 11785 - protein, 15 aa, synthetic construct
CLQGKEETLTTNWHL

SEQ ID NO: 11786 - protein, 15 aa, synthetic construct
CLQPLPPPPPPRLRP

SEQ ID NO: 11787 - protein, 15 aa, synthetic construct
CLQRWESSPKPGCRR

SEQ ID NO: 11788 - protein, 15 aa, synthetic construct
CLRKEEKRTWKGLAS

SEQ ID NO: 11789 - protein, 15 aa, synthetic construct
CLSAEPPSAASRPPR

SEQ ID NO: 11790 - protein, 15 aa, synthetic construct
CLSPGDYGGFSAAVE

SEQ ID NO: 11791 - protein, 15 aa, synthetic construct
CLSRRDRSQPEKGPV

SEQ ID NO: 11792 - protein, 15 aa, synthetic construct
CLVAANKAVKLAPRL

SEQ ID NO: 11793 - protein, 15 aa, synthetic construct
CLVSGMGKKGEDINQ

SEQ ID NO: 11794 - protein, 15 aa, synthetic construct
CLVVANKEARPAPRP

SEQ ID NO: 11795 - protein, 15 aa, synthetic construct
CLWPARSCRAGPCPP

SEQ ID NO: 11796 - protein, 15 aa, synthetic construct
CLYRADCPAAWHSCA

SEQ ID NO: 11797 - protein, 15 aa, synthetic construct
CMAWGAPRGSPLEGA

SEQ ID NO: 11798 - protein, 15 aa, synthetic construct
CMKMPNQTPWQRQTR

SEQ ID NO: 11799 - protein, 15 aa, synthetic construct
CMNGTRGATASVTSP

SEQ ID NO: 11800 - protein, 15 aa, synthetic construct
CMRSRTTNSPPASSS

SEQ ID NO: 11801 - protein, 14 aa, synthetic construct
CMTICTCMELKTRR

SEQ ID NO: 11802 - protein, 15 aa, synthetic construct
CNCPGGGSWETPVLG

SEQ ID NO: 11803 - protein, 15 aa, synthetic construct
CNGLDVCLAAEEEQG

SEQ ID NO: 11804 - protein, 15 aa, synthetic construct
CNQSCFCWPSSCCPG

SEQ ID NO: 11805 - protein, 15 aa, synthetic construct
CPAAAALSAARPPAV

SEQ ID NO: 11806 - protein, 15 aa, synthetic construct
CPAEGRARRLAGFSP

SEQ ID NO: 11807 - protein, 15 aa, synthetic construct
CPAGAGCQGGGLGPE

SEQ ID NO: 11808 - protein, 15 aa, synthetic construct
CPAGLSGSLAVPLAG

SEQ ID NO: 11809 - protein, 12 aa, synthetic construct
CPAGQNRCGKDA

SEQ ID NO: 11810 - protein, 15 aa, synthetic construct
CPAIVFLTMSSPEEG

SEQ ID NO: 11811 - protein, 15 aa, synthetic construct
CPALGRSGSAIPGPP

SEQ ID NO: 11812 - protein, 15 aa, synthetic construct
CPALSAAALGGGISW

SEQ ID NO: 11813 - protein, 15 aa, synthetic construct
CPAPGERSSRALPSR

SEQ ID NO: 11814 - protein, 15 aa, synthetic construct
CPAPGGRPRREVPLQ

SEQ ID NO: 11815 - protein, 15 aa, synthetic construct
CPAPQGPVVACGIPC

SEQ ID NO: 11816 - protein, 15 aa, synthetic construct
CPAPRRPAGAARPRG

SEQ ID NO: 11817 - protein, 15 aa, synthetic construct
CPASKTSSSASPLPV

SEQ ID NO: 11818 - protein, 15 aa, synthetic construct
CPASRASSSASPLPS

SEQ ID NO: 11819 - protein, 15 aa, synthetic construct
CPASRSTSTRSRSHS

SEQ ID NO: 11820 - protein, 15 aa, synthetic construct
CPASRTNSSASPLPS

SEQ ID NO: 11821 - protein, 15 aa, synthetic construct
CPASRTSSSASPLPS

SEQ ID NO: 11822 - protein, 15 aa, synthetic construct
CPATERHSARAAPGP

SEQ ID NO: 11823 - protein, 15 aa, synthetic construct
CPATSGPTTGPPQRM

SEQ ID NO: 11824 - protein, 15 aa, synthetic construct
CPATTREERRAAPPG

SEQ ID NO: 11825 - protein, 15 aa, synthetic construct
CPAVVTGAVERTPVH

SEQ ID NO: 11826 - protein, 15 aa, synthetic construct
CPCCPRRSPAACSIS

SEQ ID NO: 11827 - protein, 15 aa, synthetic construct
CPDAASKAERPELRL

SEQ ID NO: 11828 - protein, 15 aa, synthetic construct
CPDPGGSGVREALAA

SEQ ID NO: 11829 - protein, 15 aa, synthetic construct
CPESWISAWRSGSEA

SEQ ID NO: 11830 - protein, 15 aa, synthetic construct
CPETQKSLPQGHTAG

SEQ ID NO: 11831 - protein, 15 aa, synthetic construct
CPGERTGPRPATAAR

SEQ ID NO: 11832 - protein, 13 aa, synthetic construct
CPGESKANPGRSN

SEQ ID NO: 11833 - protein, 15 aa, synthetic construct
CPGFPQSRAGRQGGR

SEQ ID NO: 11834 - protein, 15 aa, synthetic construct
CPGGASTSPPPTASS

SEQ ID NO: 11835 - protein, 15 aa, synthetic construct
CPGGRREQLPALPGF

SEQ ID NO: 11836 - protein, 14 aa, synthetic construct
CPGGSRSSPSAFPH

SEQ ID NO: 11837 - protein, 15 aa, synthetic construct
CPGPCQTKRKESKSV

SEQ ID NO: 11838 - protein, 15 aa, synthetic construct
CPGRAASCSDTCSRP

SEQ ID NO: 11839 - protein, 15 aa, synthetic construct
CPGRRRRRRPGRSRA

SEQ ID NO: 11840 - protein, 15 aa, synthetic construct
CPGRSFDAGASSLAR

SEQ ID NO: 11841 - protein, 15 aa, synthetic construct
CPGTRTPCPVPCDAG

SEQ ID NO: 11842 - protein, 15 aa, synthetic construct
CPGVSRQPSPCGCSA

SEQ ID NO: 11843 - protein, 15 aa, synthetic construct
CPITTSACCAQVPST

SEQ ID NO: 11844 - protein, 15 aa, synthetic construct
CPLAAAPGASWRGFC

SEQ ID NO: 11845 - protein, 15 aa, synthetic construct
CPLLGAMETLRPVRR

SEQ ID NO: 11846 - protein, 15 aa, synthetic construct
CPLPPPPPPPVPLRP

SEQ ID NO: 11847 - protein, 15 aa, synthetic construct
CPLPRPPPPGGSCWG

SEQ ID NO: 11848 - protein, 15 aa, synthetic construct
CPLRRWRGPPQEGVG

SEQ ID NO: 11849 - protein, 15 aa, synthetic construct
CPLSAWAWSAALQHP

SEQ ID NO: 11850 - protein, 13 aa, synthetic construct
CPLSSSISPSMRG

SEQ ID NO: 11851 - protein, 15 aa, synthetic construct
CPLYIPEVKNSLGIG

SEQ ID NO: 11852 - protein, 15 aa, synthetic construct
CPNSPEEVAAAGGTR

SEQ ID NO: 11853 - protein, 15 aa, synthetic construct
CPPAGSGAASCLGSR

SEQ ID NO: 11854 - protein, 15 aa, synthetic construct
CPPPPTPRTGPRTGR

SEQ ID NO: 11855 - protein, 15 aa, synthetic construct
CPPPTPPRHRPRASA

SEQ ID NO: 11856 - protein, 15 aa, synthetic construct
CPPPWTMSWSMEGSF

SEQ ID NO: 11857 - protein, 15 aa, synthetic construct
CPPRARSRGRGPGPG

SEQ ID NO: 11858 - protein, 15 aa, synthetic construct
CPPSVAGPACPAPAC

SEQ ID NO: 11859 - protein, 15 aa, synthetic construct
CPQPPLGPCPRGARV

SEQ ID NO: 11860 - protein, 15 aa, synthetic construct
CPQYPGPAIPRTSWA

SEQ ID NO: 11861 - protein, 15 aa, synthetic construct
CPRAQDASSRCWPGR

SEQ ID NO: 11862 - protein, 15 aa, synthetic construct
CPRCARCCWPWPLPP

SEQ ID NO: 11863 - protein, 15 aa, synthetic construct
CPRCCCCCSSRRRCW

SEQ ID NO: 11864 - protein, 15 aa, synthetic construct
CPRNKKKRTLRRRPA

SEQ ID NO: 11865 - protein, 15 aa, synthetic construct
CPRPGRPPRDSAGSR

SEQ ID NO: 11866 - protein, 15 aa, synthetic construct
CPRRRRMRAARGAGS

SEQ ID NO: 11867 - protein, 15 aa, synthetic construct
CPRSCCCCPRPPRPR

SEQ ID NO: 11868 - protein, 15 aa, synthetic construct
CPRSCPTAKTRWAAS

SEQ ID NO: 11869 - protein, 15 aa, synthetic construct
CPRSQFRFSKPRQHA

SEQ ID NO: 11870 - protein, 15 aa, synthetic construct
CPRSRGTPRSPTAAR

SEQ ID NO: 11871 - protein, 13 aa, synthetic construct
CPSLREAGGSPGP

SEQ ID NO: 11872 - protein, 15 aa, synthetic construct
CPSPGTGTCTCPCPS

SEQ ID NO: 11873 - protein, 15 aa, synthetic construct
CPSPQSPLLPRRKAP

SEQ ID NO: 11874 - protein, 15 aa, synthetic construct
CPSPSWDTNTSARFT

SEQ ID NO: 11875 - protein, 12 aa, synthetic construct
CPSRARKASPGS

SEQ ID NO: 11876 - protein, 15 aa, synthetic construct
CPSSETGSRPCLPCA

SEQ ID NO: 11877 - protein, 15 aa, synthetic construct
CPSSRWPRIPTSPST

SEQ ID NO: 11878 - protein, 15 aa, synthetic construct
CPSTAPQEIALPGPL

SEQ ID NO: 11879 - protein, 12 aa, synthetic construct
CPSVSRPVCSSL

SEQ ID NO: 11880 - protein, 15 aa, synthetic construct
CPTETTTSFPATCRS

SEQ ID NO: 11881 - protein, 15 aa, synthetic construct
CPTEWSAEKPVTPGA

SEQ ID NO: 11882 - protein, 15 aa, synthetic construct
CPTGPQSGRGRRLIQ

SEQ ID NO: 11883 - protein, 15 aa, synthetic construct
CPTGPTTSVSPGVAS

SEQ ID NO: 11884 - protein, 15 aa, synthetic construct
CPTPKTAKAAAKTSA

SEQ ID NO: 11885 - protein, 15 aa, synthetic construct
CPTPLARPPAASPGS

SEQ ID NO: 11886 - protein, 15 aa, synthetic construct
CPTRKRGRAEAPRRP

SEQ ID NO: 11887 - protein, 14 aa, synthetic construct
CPTRPRPSLPTRSF

SEQ ID NO: 11888 - protein, 15 aa, synthetic construct
CPTTAALETSPPAPL

SEQ ID NO: 11889 - protein, 15 aa, synthetic construct
CPTTAALETSPPAPV

SEQ ID NO: 11890 - protein, 15 aa, synthetic construct
CPTTAAVETSPPIPV

SEQ ID NO: 11891 - protein, 15 aa, synthetic construct
CPTTEELPRPLRGSL

SEQ ID NO: 11892 - protein, 14 aa, synthetic construct
CPVSGPRAPTFPAT

SEQ ID NO: 11893 - protein, 15 aa, synthetic construct
CQANRRKSFFAWPEC

SEQ ID NO: 11894 - protein, 15 aa, synthetic construct
CQAQNGFNMSLRPRS

SEQ ID NO: 11895 - protein, 13 aa, synthetic construct
CQARKATGPSCVT

SEQ ID NO: 11896 - protein, 15 aa, synthetic construct
CQDAESREARPALRP

SEQ ID NO: 11897 - protein, 15 aa, synthetic construct
CQDALPSAPSRAPWV

SEQ ID NO: 11898 - protein, 15 aa, synthetic construct
CQDPDFSVSPQRSQR

SEQ ID NO: 11899 - protein, 15 aa, synthetic construct
CQDSATASSFGQTPV

SEQ ID NO: 11900 - protein, 15 aa, synthetic construct
CQEAVAEDGGGRGGG

SEQ ID NO: 11901 - protein, 15 aa, synthetic construct
CQFLHFFQNKGHSNY

SEQ ID NO: 11902 - protein, 15 aa, synthetic construct
CQGPPCQSLPFVIGL

SEQ ID NO: 11903 - protein, 15 aa, synthetic construct
CQKEEATVHALSPAS

SEQ ID NO: 11904 - protein, 13 aa, synthetic construct
CQLMGHHPRDSLP

SEQ ID NO: 11905 - protein, 15 aa, synthetic construct
CQLVPAPAVAKGAVA

SEQ ID NO: 11906 - protein, 13 aa, synthetic construct
CQPAGALQLQSAF

SEQ ID NO: 11907 - protein, 15 aa, synthetic construct
CQPGSECSEYSCNRD

SEQ ID NO: 11908 - protein, 15 aa, synthetic construct
CQPKASEPECSTEGS

SEQ ID NO: 11909 - protein, 15 aa, synthetic construct
CQPRGATSSTRARRA

SEQ ID NO: 11910 - protein, 15 aa, synthetic construct
CQPRRAASASSSTSS

SEQ ID NO: 11911 - protein, 15 aa, synthetic construct
CQPSPRGTPPRPVQP

SEQ ID NO: 11912 - protein, 15 aa, synthetic construct
CQPTSQRAASIPVGP

SEQ ID NO: 11913 - protein, 15 aa, synthetic construct
CQSLSAQKSRSPCGR

SEQ ID NO: 11914 - protein, 15 aa, synthetic construct
CQSPPRRWGSSAPGR

SEQ ID NO: 11915 - protein, 14 aa, synthetic construct
CQSSAGPPGASGSP

SEQ ID NO: 11916 - protein, 15 aa, synthetic construct
CQSSAGPPGASGSPR

SEQ ID NO: 11917 - protein, 15 aa, synthetic construct
CQTAAQRQASAGKLA

SEQ ID NO: 11918 - protein, 15 aa, synthetic construct
CQTCSQSSSTSSFSS

SEQ ID NO: 11919 - protein, 15 aa, synthetic construct
CQVKGLCPLAGEDRA

SEQ ID NO: 11920 - protein, 15 aa, synthetic construct
CQVPGGAWRDGRWAS

SEQ ID NO: 11921 - protein, 15 aa, synthetic construct
CQVQVILPTKEHSAQ

SEQ ID NO: 11922 - protein, 15 aa, synthetic construct
CRAAASAPAARGPRR

SEQ ID NO: 11923 - protein, 15 aa, synthetic construct
CRAAPTGSAQDAGSP

SEQ ID NO: 11924 - protein, 15 aa, synthetic construct
CRAAQCHMPTRPPPS

SEQ ID NO: 11925 - protein, 14 aa, synthetic construct
CRAARTRRWGEAGA

SEQ ID NO: 11926 - protein, 15 aa, synthetic construct
CRAGGRRKRKPARRR

SEQ ID NO: 11927 - protein, 15 aa, synthetic construct
CRAGRRRGRPRRRPG

SEQ ID NO: 11928 - protein, 15 aa, synthetic construct
CRALPAAEPCAPCCA

SEQ ID NO: 11929 - protein, 15 aa, synthetic construct
CRAPPRPPRSPGPAP

SEQ ID NO: 11930 - protein, 15 aa, synthetic construct
CRARGDGSWGAAAAP

SEQ ID NO: 11931 - protein, 15 aa, synthetic construct
CRASCPTREASSRTR

SEQ ID NO: 11932 - protein, 15 aa, synthetic construct
CRASPPEASLMRGGS

SEQ ID NO: 11933 - protein, 15 aa, synthetic construct
CRATAARCPTPPSPC

SEQ ID NO: 11934 - protein, 12 aa, synthetic construct
CRCCYCCPCCGQ

SEQ ID NO: 11935 - protein, 15 aa, synthetic construct
CRCEETAGFHPGGSC

SEQ ID NO: 11936 - protein, 15 aa, synthetic construct
CRCPLRQTPPPPPPR

SEQ ID NO: 11937 - protein, 14 aa, synthetic construct
CRCSPGPGPGGGTR

SEQ ID NO: 11938 - protein, 15 aa, synthetic construct
CRCSSRGGECGCRSQ

SEQ ID NO: 11939 - protein, 15 aa, synthetic construct
CRCTTPSIYASSGPW

SEQ ID NO: 11940 - protein, 15 aa, synthetic construct
CRDAASREAKLAPKP

SEQ ID NO: 11941 - protein, 15 aa, synthetic construct
CRDHQQDCEGPTTPA

SEQ ID NO: 11942 - protein, 15 aa, synthetic construct
CRDRAPCTASSPSLR

SEQ ID NO: 11943 - protein, 15 aa, synthetic construct
CRDVASRAAKLAPRL

SEQ ID NO: 11944 - protein, 15 aa, synthetic construct
CRELTTAPGPGPGPG

SEQ ID NO: 11945 - protein, 15 aa, synthetic construct
CREQPGLTAKREVGQ

SEQ ID NO: 11946 - protein, 15 aa, synthetic construct
CRESVTPSPTRAGWH

SEQ ID NO: 11947 - protein, 13 aa, synthetic construct
CRGENSRHPSGRQ

SEQ ID NO: 11948 - protein, 15 aa, synthetic construct
CRGGGDAEGPPVLAA

SEQ ID NO: 11949 - protein, 13 aa, synthetic construct
CRGGSSRRPGAQQ

SEQ ID NO: 11950 - protein, 15 aa, synthetic construct
CRGLAPAAAAPSCWC

SEQ ID NO: 11951 - protein, 15 aa, synthetic construct
CRGPPGCPRSSRSPP

SEQ ID NO: 11952 - protein, 15 aa, synthetic construct
CRGRRKSRDPRSSRT

SEQ ID NO: 11953 - protein, 15 aa, synthetic construct
CRGRRRCGGGCCCCC

SEQ ID NO: 11954 - protein, 15 aa, synthetic construct
CRGRSRAVRRAAAGA

SEQ ID NO: 11955 - protein, 15 aa, synthetic construct
CRISKSSAAAPTRTY

SEQ ID NO: 11956 - protein, 15 aa, synthetic construct
CRKESSGRGWQRPEC

SEQ ID NO: 11957 - protein, 15 aa, synthetic construct
CRKGSRPPAASCRGA

SEQ ID NO: 11958 - protein, 15 aa, synthetic construct
CRKWLSCPSCMKRAV

SEQ ID NO: 11959 - protein, 15 aa, synthetic construct
CRLINAGQVVEVSKR

SEQ ID NO: 11960 - protein, 15 aa, synthetic construct
CRLPGPPSVCQAAAA

SEQ ID NO: 11961 - protein, 15 aa, synthetic construct
CRLRGRRSRRPRTRP

SEQ ID NO: 11962 - protein, 15 aa, synthetic construct
CRLRWWSPRGPSPSE

SEQ ID NO: 11963 - protein, 15 aa, synthetic construct
CRLTERCGAACEAAS

SEQ ID NO: 11964 - protein, 15 aa, synthetic construct
CRMSKAPVPEAPGML

SEQ ID NO: 11965 - protein, 15 aa, synthetic construct
CRNAEAAAAAAAAAR

SEQ ID NO: 11966 - protein, 15 aa, synthetic construct
CRNPGRTLPAPPAHS

SEQ ID NO: 11967 - protein, 15 aa, synthetic construct
CRPGLGASAPDWASL

SEQ ID NO: 11968 - protein, 15 aa, synthetic construct
CRPGPRREVGALPPT

SEQ ID NO: 11969 - protein, 15 aa, synthetic construct
CRPHFCPPSTMSTSC

SEQ ID NO: 11970 - protein, 15 aa, synthetic construct
CRPIFRGRKMPSNAP

SEQ ID NO: 11971 - protein, 15 aa, synthetic construct
CRPKAGAQGVRRAML

SEQ ID NO: 11972 - protein, 15 aa, synthetic construct
CRPMGQEEEEEVAAA

SEQ ID NO: 11973 - protein, 15 aa, synthetic construct
CRPPRAGTGTAGGEE

SEQ ID NO: 11974 - protein, 15 aa, synthetic construct
CRPRISESVTGTGFA

SEQ ID NO: 11975 - protein, 15 aa, synthetic construct
CRPSCSSYSWPLAPA

SEQ ID NO: 11976 - protein, 15 aa, synthetic construct
CRPSTAARGTCWMMM

SEQ ID NO: 11977 - protein, 15 aa, synthetic construct
CRPTAPAPRRWRWRR

SEQ ID NO: 11978 - protein, 15 aa, synthetic construct
CRPYSKEFGGLWSIP

SEQ ID NO: 11979 - protein, 15 aa, synthetic construct
CRQKGAKHGREGLCC

SEQ ID NO: 11980 - protein, 15 aa, synthetic construct
CRRAGPHLCAAVLQR

SEQ ID NO: 11981 - protein, 15 aa, synthetic construct
CRRAPGPAAPQLPRR

SEQ ID NO: 11982 - protein, 15 aa, synthetic construct
CRRDAPYRRHPPAAS

SEQ ID NO: 11983 - protein, 15 aa, synthetic construct
CRRQRRRAGARARGS

SEQ ID NO: 11984 - protein, 15 aa, synthetic construct
CRRRAWTTSLPGGSC

SEQ ID NO: 11985 - protein, 15 aa, synthetic construct
CRRRGAVPACRPPGP

SEQ ID NO: 11986 - protein, 15 aa, synthetic construct
CRRRPEARRRLRRRR

SEQ ID NO: 11987 - protein, 15 aa, synthetic construct
CRRRPRARLPPRPRP

SEQ ID NO: 11988 - protein, 15 aa, synthetic construct
CRRRPSSSRRSPSGS

SEQ ID NO: 11989 - protein, 15 aa, synthetic construct
CRRRRPEPPPSSAAT

SEQ ID NO: 11990 - protein, 15 aa, synthetic construct
CRRRRPKSVKRSSTP

SEQ ID NO: 11991 - protein, 13 aa, synthetic construct
CRRRRPSSSAAPS

SEQ ID NO: 11992 - protein, 15 aa, synthetic construct
CRRRRRRRGLPAPPS

SEQ ID NO: 11993 - protein, 13 aa, synthetic construct
CRRRRRRRSTRGW

SEQ ID NO: 11994 - protein, 15 aa, synthetic construct
CRRSASAMSCPAAAR

SEQ ID NO: 11995 - protein, 15 aa, synthetic construct
CRRSEELGEAVGGGQ

SEQ ID NO: 11996 - protein, 15 aa, synthetic construct
CRRSRRPTGMSAGSA

SEQ ID NO: 11997 - protein, 12 aa, synthetic construct
CRRSSTPTRSKS

SEQ ID NO: 11998 - protein, 15 aa, synthetic construct
CRRTWPSELPLWELG

SEQ ID NO: 11999 - protein, 15 aa, synthetic construct
CRRYHPARTRRAWPA

SEQ ID NO: 12000 - protein, 15 aa, synthetic construct
CRSAGATSLPKTLTW

SEQ ID NO: 12001 - protein, 15 aa, synthetic construct
CRSKEAPSASNTCCS

SEQ ID NO: 12002 - protein, 15 aa, synthetic construct
CRSRRCCCAGAGSAS

SEQ ID NO: 12003 - protein, 12 aa, synthetic construct
CRSSLSAASLAV

SEQ ID NO: 12004 - protein, 15 aa, synthetic construct
CRSTRPGRSSAALPR

SEQ ID NO: 12005 - protein, 15 aa, synthetic construct
CRSVRDPLLLRRGAS

SEQ ID NO: 12006 - protein, 15 aa, synthetic construct
CRTEPGSSAPRAAAA

SEQ ID NO: 12007 - protein, 15 aa, synthetic construct
CRTSETGSGASRRSR

SEQ ID NO: 12008 - protein, 15 aa, synthetic construct
CRVAAAPAGERPARA

SEQ ID NO: 12009 - protein, 15 aa, synthetic construct
CRVRPGKLAGGRVAP

SEQ ID NO: 12010 - protein, 15 aa, synthetic construct
CRVTPPRGLSHSGTR

SEQ ID NO: 12011 - protein, 15 aa, synthetic construct
CRWDSEVPKEGCWEL

SEQ ID NO: 12012 - protein, 15 aa, synthetic construct
CSAAARGPAPTTGIF

SEQ ID NO: 12013 - protein, 15 aa, synthetic construct
CSAAECHKGAGWLPK

SEQ ID NO: 12014 - protein, 15 aa, synthetic construct
CSAAIPASTLARGAG

SEQ ID NO: 12015 - protein, 15 aa, synthetic construct
CSALAPAVAAGNVTS

SEQ ID NO: 12016 - protein, 15 aa, synthetic construct
CSAPGRARTRRPYSW

SEQ ID NO: 12017 - protein, 15 aa, synthetic construct
CSAPRGWGPRAPRSP

SEQ ID NO: 12018 - protein, 15 aa, synthetic construct
CSAPRSAPKSRRSGT

SEQ ID NO: 12019 - protein, 15 aa, synthetic construct
CSAPVVEACAAGRTS

SEQ ID NO: 12020 - protein, 15 aa, synthetic construct
CSARRVTGCGPGVLG

SEQ ID NO: 12021 - protein, 15 aa, synthetic construct
CSATGIWLCPRPCGA

SEQ ID NO: 12022 - protein, 15 aa, synthetic construct
CSCAGPSSPAGPSSP

SEQ ID NO: 12023 - protein, 14 aa, synthetic construct
CSCHPSTCGRTTST

SEQ ID NO: 12024 - protein, 15 aa, synthetic construct
CSCPISAKSSTRWSR

SEQ ID NO: 12025 - protein, 15 aa, synthetic construct
CSCTEGPPPALARRA

SEQ ID NO: 12026 - protein, 15 aa, synthetic construct
CSDCGHGVHQEDQHR

SEQ ID NO: 12027 - protein, 15 aa, synthetic construct
CSEAPPSQTLAPDVA

SEQ ID NO: 12028 - protein, 15 aa, synthetic construct
CSEPIPSSPPSVPVA

SEQ ID NO: 12029 - protein, 15 aa, synthetic construct
CSETSGNPARAPGTA

SEQ ID NO: 12030 - protein, 15 aa, synthetic construct
CSGAARGSGGRGSSS

SEQ ID NO: 12031 - protein, 15 aa, synthetic construct
CSGAPKMAGPGGGAR

SEQ ID NO: 12032 - protein, 15 aa, synthetic construct
CSGAPRCACDCGSAW

SEQ ID NO: 12033 - protein, 15 aa, synthetic construct
CSGAQREENGSSRLG

SEQ ID NO: 12034 - protein, 15 aa, synthetic construct
CSGPEAVAPLGATAG

SEQ ID NO: 12035 - protein, 15 aa, synthetic construct
CSGPNARGWCGDFGE

SEQ ID NO: 12036 - protein, 15 aa, synthetic construct
CSGPNDLRSSGVSGG

SEQ ID NO: 12037 - protein, 15 aa, synthetic construct
CSGRCCCCPPPPPTP

SEQ ID NO: 12038 - protein, 12 aa, synthetic construct
CSGRDPRSGPLR

SEQ ID NO: 12039 - protein, 15 aa, synthetic construct
CSGSPRVARSSRSSS

SEQ ID NO: 12040 - protein, 13 aa, synthetic construct
CSHVLDTTTLMAF

SEQ ID NO: 12041 - protein, 15 aa, synthetic construct
CSLASYPLFCACLAG

SEQ ID NO: 12042 - protein, 15 aa, synthetic construct
CSLGTERPCRELPRP

SEQ ID NO: 12043 - protein, 15 aa, synthetic construct
CSLKNCGWKMRKSVL

SEQ ID NO: 12044 - protein, 15 aa, synthetic construct
CSLRAWIWCRRWPPS

SEQ ID NO: 12045 - protein, 15 aa, synthetic construct
CSLREQKREKASSRD

SEQ ID NO: 12046 - protein, 15 aa, synthetic construct
CSNRVRGDGPGATGP

SEQ ID NO: 12047 - protein, 15 aa, synthetic construct
CSPAAAQPRGPLPRK

SEQ ID NO: 12048 - protein, 15 aa, synthetic construct
CSPAAPRRPVRSCCP

SEQ ID NO: 12049 - protein, 15 aa, synthetic construct
CSPAGTAQVLLRRAA

SEQ ID NO: 12050 - protein, 12 aa, synthetic construct
CSPAPSSPAPPL

SEQ ID NO: 12051 - protein, 15 aa, synthetic construct
CSPETTGAGSPWPGA

SEQ ID NO: 12052 - protein, 15 aa, synthetic construct
CSPGAQEAARGEAAS

SEQ ID NO: 12053 - protein, 15 aa, synthetic construct
CSPGKTSRALAASPV

SEQ ID NO: 12054 - protein, 15 aa, synthetic construct
CSPNGGERGSGPLAA

SEQ ID NO: 12055 - protein, 14 aa, synthetic construct
CSPPATVCREAGGP

SEQ ID NO: 12056 - protein, 15 aa, synthetic construct
CSPPSPGLPALLSAA

SEQ ID NO: 12057 - protein, 15 aa, synthetic construct
CSPRAPPATASSGSP

SEQ ID NO: 12058 - protein, 15 aa, synthetic construct
CSPRGGKRRSCPGRT

SEQ ID NO: 12059 - protein, 15 aa, synthetic construct
CSPSASPCKSHFRAA

SEQ ID NO: 12060 - protein, 15 aa, synthetic construct
CSQRRRRRMLASAVV

SEQ ID NO: 12061 - protein, 15 aa, synthetic construct
CSRGGEESPCGWHCQ

SEQ ID NO: 12062 - protein, 15 aa, synthetic construct
CSRGGGGRETAPAAE

SEQ ID NO: 12063 - protein, 15 aa, synthetic construct
CSRRSPERTGSESCA

SEQ ID NO: 12064 - protein, 15 aa, synthetic construct
CSRSAEAPSISFQSS

SEQ ID NO: 12065 - protein, 15 aa, synthetic construct
CSRSQSLSRVSRKTP

SEQ ID NO: 12066 - protein, 15 aa, synthetic construct
CSRTAEQKRIAAEAP

SEQ ID NO: 12067 - protein, 15 aa, synthetic construct
CSSFMQALGKAGAAA

SEQ ID NO: 12068 - protein, 15 aa, synthetic construct
CSSGSSGASFSPLCC

SEQ ID NO: 12069 - protein, 15 aa, synthetic construct
CSSGTRSPSTTTSTT

SEQ ID NO: 12070 - protein, 15 aa, synthetic construct
CSSKEEAGFGYTSEQ

SEQ ID NO: 12071 - protein, 15 aa, synthetic construct
CSSLCSWGARRQRWS

SEQ ID NO: 12072 - protein, 15 aa, synthetic construct
CSSLDEERPTSGGRR

SEQ ID NO: 12073 - protein, 15 aa, synthetic construct
CSSLLGLSWDRPKAS

SEQ ID NO: 12074 - protein, 15 aa, synthetic construct
CSSPRPEPGRGRGKP

SEQ ID NO: 12075 - protein, 15 aa, synthetic construct
CSSPRRSGPGRLASP

SEQ ID NO: 12076 - protein, 15 aa, synthetic construct
CSSPSAPSWVCARSR

SEQ ID NO: 12077 - protein, 14 aa, synthetic construct
CSSQSSCSWARDAV

SEQ ID NO: 12078 - protein, 15 aa, synthetic construct
CSSRRRLLPPRMAPA

SEQ ID NO: 12079 - protein, 15 aa, synthetic construct
CSSSLCPGLAPPQLS

SEQ ID NO: 12080 - protein, 15 aa, synthetic construct
CSSTAASAPTTPPGP

SEQ ID NO: 12081 - protein, 12 aa, synthetic construct
CSSVRDSANISL

SEQ ID NO: 12082 - protein, 15 aa, synthetic construct
CSTIPTCFSATPAAL

SEQ ID NO: 12083 - protein, 15 aa, synthetic construct
CSTPAARPPTTAETT

SEQ ID NO: 12084 - protein, 15 aa, synthetic construct
CSTPNRSVPLQLPRK

SEQ ID NO: 12085 - protein, 15 aa, synthetic construct
CSTSEAVAVGSRFPS

SEQ ID NO: 12086 - protein, 15 aa, synthetic construct
CSVHVINNHLNPPDL

SEQ ID NO: 12087 - protein, 15 aa, synthetic construct
CSWPSLAPPGQRCGH

SEQ ID NO: 12088 - protein, 15 aa, synthetic construct
CSWRLREGPSQRKGW

SEQ ID NO: 12089 - protein, 15 aa, synthetic construct
CTAAAWLRASQPTPA

SEQ ID NO: 12090 - protein, 15 aa, synthetic construct
CTAAGWELAPSPRRN

SEQ ID NO: 12091 - protein, 15 aa, synthetic construct
CTACSAKATTPSASG

SEQ ID NO: 12092 - protein, 15 aa, synthetic construct
CTAGRRDPLFVCACC

SEQ ID NO: 12093 - protein, 15 aa, synthetic construct
CTAPRPAALPPPCRP

SEQ ID NO: 12094 - protein, 15 aa, synthetic construct
CTASSAKATTPNESG

SEQ ID NO: 12095 - protein, 15 aa, synthetic construct
CTDREPGRLPRAGSG

SEQ ID NO: 12096 - protein, 15 aa, synthetic construct
CTERLPPQPSSRRAE

SEQ ID NO: 12097 - protein, 15 aa, synthetic construct
CTGAATSSRPARSST

SEQ ID NO: 12098 - protein, 15 aa, synthetic construct
CTGGEAGAVGKIRSQ

SEQ ID NO: 12099 - protein, 15 aa, synthetic construct
CTILPTGSSSRRQLP

SEQ ID NO: 12100 - protein, 15 aa, synthetic construct
CTRGKDPRDPRAEAP

SEQ ID NO: 12101 - protein, 15 aa, synthetic construct
CTRGTAAAATATGTA

SEQ ID NO: 12102 - protein, 15 aa, synthetic construct
CTRIIPGTLTPRPGA

SEQ ID NO: 12103 - protein, 15 aa, synthetic construct
CTSANCAPPLTAAPR

SEQ ID NO: 12104 - protein, 15 aa, synthetic construct
CTSARGNGTSGCASA

SEQ ID NO: 12105 - protein, 15 aa, synthetic construct
CTSNSHQSLLFPGLA

SEQ ID NO: 12106 - protein, 15 aa, synthetic construct
CTSRLQPPAAAAAAA

SEQ ID NO: 12107 - protein, 14 aa, synthetic construct
CTSTDYSLGPHVGS

SEQ ID NO: 12108 - protein, 15 aa, synthetic construct
CTSVGAPTPGSCSAG

SEQ ID NO: 12109 - protein, 15 aa, synthetic construct
CTTGRAAASRGTPSP

SEQ ID NO: 12110 - protein, 15 aa, synthetic construct
CTTVWKRLPRVRDGC

SEQ ID NO: 12111 - protein, 15 aa, synthetic construct
CTWWRGTGGWPAAGT

SEQ ID NO: 12112 - protein, 13 aa, synthetic construct
CVGLRSGFPCRPL

SEQ ID NO: 12113 - protein, 15 aa, synthetic construct
CVHQAHLPVLQEGPR

SEQ ID NO: 12114 - protein, 14 aa, synthetic construct
CVLAGALAWALGPA

SEQ ID NO: 12115 - protein, 15 aa, synthetic construct
CVQSVAESPATPLAI

SEQ ID NO: 12116 - protein, 15 aa, synthetic construct
CVREGKSGGGPSSGL

SEQ ID NO: 12117 - protein, 15 aa, synthetic construct
CVRGAPSQPREDGGC

SEQ ID NO: 12118 - protein, 15 aa, synthetic construct
CVRSATEPGSSSACC

SEQ ID NO: 12119 - protein, 15 aa, synthetic construct
CVSGAAPGPSSPPAS

SEQ ID NO: 12120 - protein, 15 aa, synthetic construct
CVTSLSRSRPRRSAR

SEQ ID NO: 12121 - protein, 15 aa, synthetic construct
CWAKGERRRGGGRGA

SEQ ID NO: 12122 - protein, 15 aa, synthetic construct
CWARASGGSQPLWSV

SEQ ID NO: 12123 - protein, 15 aa, synthetic construct
CWEAWGSWLPKAWPT

SEQ ID NO: 12124 - protein, 15 aa, synthetic construct
CWESPTSAALTQDPA

SEQ ID NO: 12125 - protein, 15 aa, synthetic construct
CWLSLKCQSHPIIQS

SEQ ID NO: 12126 - protein, 15 aa, synthetic construct
CWPEWSGPGPQPPNA

SEQ ID NO: 12127 - protein, 15 aa, synthetic construct
CWPGCCAAAGSGPRE

SEQ ID NO: 12128 - protein, 14 aa, synthetic construct
CWPQAVSWTQTKKW

SEQ ID NO: 12129 - protein, 15 aa, synthetic construct
CWPRAEPPSSCCTWS

SEQ ID NO: 12130 - protein, 15 aa, synthetic construct
CWRDDSEILSRPCGA

SEQ ID NO: 12131 - protein, 15 aa, synthetic construct
CWRGGPEPGARSGNW

SEQ ID NO: 12132 - protein, 15 aa, synthetic construct
CWRRRCWRCSCRPRG

SEQ ID NO: 12133 - protein, 15 aa, synthetic construct
CWRRRRRRRRRCSRG

SEQ ID NO: 12134 - protein, 15 aa, synthetic construct
CWVDPDRMEDAAWPR

SEQ ID NO: 12135 - protein, 15 aa, synthetic construct
CYPAWPPPRPTDVAG

SEQ ID NO: 12136 - protein, 15 aa, synthetic construct
DAAAAAGGAAGPGHL

SEQ ID NO: 12137 - protein, 15 aa, synthetic construct
DAAAPVGPPEAAALQ

SEQ ID NO: 12138 - protein, 15 aa, synthetic construct
DAAARLGDAAGPAPA

SEQ ID NO: 12139 - protein, 15 aa, synthetic construct
DAAASGGRALRRDPG

SEQ ID NO: 12140 - protein, 15 aa, synthetic construct
DAAAWPARRSPQRHR

SEQ ID NO: 12141 - protein, 15 aa, synthetic construct
DAAGRAAPAGPGPGG

SEQ ID NO: 12142 - protein, 15 aa, synthetic construct
DAARLPGALPAAAAA

SEQ ID NO: 12143 - protein, 15 aa, synthetic construct
DAATRSGPLANPLLF

SEQ ID NO: 12144 - protein, 15 aa, synthetic construct
DACQRAHQPGHPGCH

SEQ ID NO: 12145 - protein, 15 aa, synthetic construct
DADAVSAGAAHVRGL

SEQ ID NO: 12146 - protein, 15 aa, synthetic construct
DAEAARRQRALAPGP

SEQ ID NO: 12147 - protein, 15 aa, synthetic construct
DAEAEQAERRCGQAR

SEQ ID NO: 12148 - protein, 15 aa, synthetic construct
DAECDCPRGRGCQGA

SEQ ID NO: 12149 - protein, 15 aa, synthetic construct
DAEERAERLQREVEG

SEQ ID NO: 12150 - protein, 15 aa, synthetic construct
DAELQMPAPKAPRLA

SEQ ID NO: 12151 - protein, 15 aa, synthetic construct
DAEPRTGARAAPPPL

SEQ ID NO: 12152 - protein, 15 aa, synthetic construct
DAGAAGHRRLRERLS

SEQ ID NO: 12153 - protein, 15 aa, synthetic construct
DAGRDPFGGARDGGG

SEQ ID NO: 12154 - protein, 15 aa, synthetic construct
DAGSGRARAPGAPRA

SEQ ID NO: 12155 - protein, 15 aa, synthetic construct
DAHAPAAPAAARGRG

SEQ ID NO: 12156 - protein, 15 aa, synthetic construct
DAHHPSSPPAGHPQR

SEQ ID NO: 12157 - protein, 15 aa, synthetic construct
DAIQQWAARSARLPA

SEQ ID NO: 12158 - protein, 14 aa, synthetic construct
DAITGICKCLGSRS

SEQ ID NO: 12159 - protein, 15 aa, synthetic construct
DALPRWPSGSGDGGA

SEQ ID NO: 12160 - protein, 15 aa, synthetic construct
DANVRPTLRGALVPH

SEQ ID NO: 12161 - protein, 13 aa, synthetic construct
DAPAAQFPPPCGR

SEQ ID NO: 12162 - protein, 15 aa, synthetic construct
DAPEEKAEEEGHRLP

SEQ ID NO: 12163 - protein, 15 aa, synthetic construct
DAPVPAGHSRLEDLP

SEQ ID NO: 12164 - protein, 15 aa, synthetic construct
DAQRDLPVPAGALPL

SEQ ID NO: 12165 - protein, 15 aa, synthetic construct
DARARGEGEAGAAAG

SEQ ID NO: 12166 - protein, 15 aa, synthetic construct
DARGPRGNPAASGAS

SEQ ID NO: 12167 - protein, 15 aa, synthetic construct
DARLHQPLGSQNRRG

SEQ ID NO: 12168 - protein, 15 aa, synthetic construct
DARPLRASPDVRGAP

SEQ ID NO: 12169 - protein, 15 aa, synthetic construct
DARPRLGDAAGGGGG

SEQ ID NO: 12170 - protein, 15 aa, synthetic construct
DARTGGRSGHLNVCL

SEQ ID NO: 12171 - protein, 12 aa, synthetic construct
DASLPSAAAAAT

SEQ ID NO: 12172 - protein, 15 aa, synthetic construct
DATVPGGGGRAAEPR

SEQ ID NO: 12173 - protein, 15 aa, synthetic construct
DAVAAAPAGGGARGR

SEQ ID NO: 12174 - protein, 15 aa, synthetic construct
DAVQGVRLAAGTAAG

SEQ ID NO: 12175 - protein, 15 aa, synthetic construct
DAVRASPKVVSNPRA

SEQ ID NO: 12176 - protein, 15 aa, synthetic construct
DAVSGDNPGTTAAGA

SEQ ID NO: 12177 - protein, 15 aa, synthetic construct
DAVVRGPQLRAPPPL

SEQ ID NO: 12178 - protein, 15 aa, synthetic construct
DCAGPRAADPVAVAV

SEQ ID NO: 12179 - protein, 15 aa, synthetic construct
DCPEDPKWNGRFDVG

SEQ ID NO: 12180 - protein, 15 aa, synthetic construct
DCRGTQPACPLAQTP

SEQ ID NO: 12181 - protein, 15 aa, synthetic construct
DCRLRPAAGAARPGW

SEQ ID NO: 12182 - protein, 15 aa, synthetic construct
DCRVGEQRSGARLVS

SEQ ID NO: 12183 - protein, 15 aa, synthetic construct
DCVEEIPVAAPASRA

SEQ ID NO: 12184 - protein, 15 aa, synthetic construct
DDAGGHVPRDGCGEA

SEQ ID NO: 12185 - protein, 15 aa, synthetic construct
DDAPGRRPAVPWAGS

SEQ ID NO: 12186 - protein, 15 aa, synthetic construct
DDDDDDEKNAASTAA

SEQ ID NO: 12187 - protein, 15 aa, synthetic construct
DDDGAEQDLRAEARE

SEQ ID NO: 12188 - protein, 15 aa, synthetic construct
DDERPRRRSGRGDDD

SEQ ID NO: 12189 - protein, 15 aa, synthetic construct
DDFRRRGGMAASISE

SEQ ID NO: 12190 - protein, 15 aa, synthetic construct
DDGEQGNGLLSPSPQ

SEQ ID NO: 12191 - protein, 15 aa, synthetic construct
DDGFKESEHGAHLCP

SEQ ID NO: 12192 - protein, 15 aa, synthetic construct
DDGLWGVRAEVGGRG

SEQ ID NO: 12193 - protein, 15 aa, synthetic construct
DDGYAARGSGGRGGA

SEQ ID NO: 12194 - protein, 15 aa, synthetic construct
DDPKTERPLGSDSRL

SEQ ID NO: 12195 - protein, 15 aa, synthetic construct
DDPQPSAGRAAEWAW

SEQ ID NO: 12196 - protein, 15 aa, synthetic construct
DDSAHGLGHGRPGMD

SEQ ID NO: 12197 - protein, 15 aa, synthetic construct
DDSDFKNFIGTDTGP

SEQ ID NO: 12198 - protein, 15 aa, synthetic construct
DDTPVNMDSPPIALD

SEQ ID NO: 12199 - protein, 15 aa, synthetic construct
DEAGGSGSSRSSWRG

SEQ ID NO: 12200 - protein, 15 aa, synthetic construct
DEDFDSFQSGEDTED

SEQ ID NO: 12201 - protein, 15 aa, synthetic construct
DEDGATGARGSPPER

SEQ ID NO: 12202 - protein, 15 aa, synthetic construct
DEDGRALDAVLLQQL

SEQ ID NO: 12203 - protein, 15 aa, synthetic construct
DEDPGGVCPHPAKAQ

SEQ ID NO: 12204 - protein, 15 aa, synthetic construct
DEDRARALPARRHRL

SEQ ID NO: 12205 - protein, 15 aa, synthetic construct
DEEAAAPHAAAGPDG

SEQ ID NO: 12206 - protein, 15 aa, synthetic construct
DEEREEVPQPEPGRV

SEQ ID NO: 12207 - protein, 15 aa, synthetic construct
DEGERENHCYCEGYR

SEQ ID NO: 12208 - protein, 15 aa, synthetic construct
DEHTGAAEACPEAAR

SEQ ID NO: 12209 - protein, 15 aa, synthetic construct
DELCAKGELATSRSA

SEQ ID NO: 12210 - protein, 15 aa, synthetic construct
DELPAAPAVGQQLHR

SEQ ID NO: 12211 - protein, 15 aa, synthetic construct
DEMHHPAAGRLGDLL

SEQ ID NO: 12212 - protein, 15 aa, synthetic construct
DEPSTAAPGRAEPPA

SEQ ID NO: 12213 - protein, 15 aa, synthetic construct
DERRCSSEKRQWREV

SEQ ID NO: 12214 - protein, 15 aa, synthetic construct
DERRNQVPAELLAPG

SEQ ID NO: 12215 - protein, 15 aa, synthetic construct
DESRAPAEALVGRGT

SEQ ID NO: 12216 - protein, 13 aa, synthetic construct
DESSNLKRKMGLL

SEQ ID NO: 12217 - protein, 15 aa, synthetic construct
DEVQAQPDADLRPRG

SEQ ID NO: 12218 - protein, 15 aa, synthetic construct
DEVSVPAAGRRPAAR

SEQ ID NO: 12219 - protein, 15 aa, synthetic construct
DFAGRSRPGDGTPGG

SEQ ID NO: 12220 - protein, 14 aa, synthetic construct
DFGGILGWRAEDRK

SEQ ID NO: 12221 - protein, 15 aa, synthetic construct
DFGSGPEAKARKHWG

SEQ ID NO: 12222 - protein, 15 aa, synthetic construct
DFHKNLDCNPSSLGC

SEQ ID NO: 12223 - protein, 15 aa, synthetic construct
DFLYGKDRRRPSSAS

SEQ ID NO: 12224 - protein, 15 aa, synthetic construct
DFPRSPERQFRGTPP

SEQ ID NO: 12225 - protein, 15 aa, synthetic construct
DFQAPNVNVKPSCPV

SEQ ID NO: 12226 - protein, 15 aa, synthetic construct
DFQGGRQGGAGGGAA

SEQ ID NO: 12227 - protein, 15 aa, synthetic construct
DFQNGEDDDDDEDID

SEQ ID NO: 12228 - protein, 15 aa, synthetic construct
DGAARGGVAGAHRDR

SEQ ID NO: 12229 - protein, 14 aa, synthetic construct
DGAAVGTATAKTAG

SEQ ID NO: 12230 - protein, 15 aa, synthetic construct
DGAEGCAGGEGGEYA

SEQ ID NO: 12231 - protein, 15 aa, synthetic construct
DGAGPRLLAAPRPPW

SEQ ID NO: 12232 - protein, 15 aa, synthetic construct
DGAGRLSRGPLGQGK

SEQ ID NO: 12233 - protein, 15 aa, synthetic construct
DGALGGPRPPLGIAV

SEQ ID NO: 12234 - protein, 15 aa, synthetic construct
DGALPQNYRGSGHLR

SEQ ID NO: 12235 - protein, 15 aa, synthetic construct
DGAPAVTAVPGPLGA

SEQ ID NO: 12236 - protein, 15 aa, synthetic construct
DGARDGGRGGSGGGT

SEQ ID NO: 12237 - protein, 15 aa, synthetic construct
DGARDSEPLLGQRSP

SEQ ID NO: 12238 - protein, 15 aa, synthetic construct
DGCGAAGPGAVEPCE

SEQ ID NO: 12239 - protein, 15 aa, synthetic construct
DGCVWCGFPKQGSLE

SEQ ID NO: 12240 - protein, 15 aa, synthetic construct
DGDGGCLVNERDRCC

SEQ ID NO: 12241 - protein, 15 aa, synthetic construct
DGDHGRDGDAGVLLR

SEQ ID NO: 12242 - protein, 15 aa, synthetic construct
DGDPDGRGRRRGGVP

SEQ ID NO: 12243 - protein, 12 aa, synthetic construct
DGDTGAQSVPSR

SEQ ID NO: 12244 - protein, 15 aa, synthetic construct
DGEAAAVAGPRGTVD

SEQ ID NO: 12245 - protein, 15 aa, synthetic construct
DGEACGPPEVSRPNF

SEQ ID NO: 12246 - protein, 15 aa, synthetic construct
DGEAHQHFSAERADS

SEQ ID NO: 12247 - protein, 15 aa, synthetic construct
DGEDGGGGRRRRRWP

SEQ ID NO: 12248 - protein, 15 aa, synthetic construct
DGEGFGDDSPPPGLS

SEQ ID NO: 12249 - protein, 13 aa, synthetic construct
DGEKVLPGETAQT

SEQ ID NO: 12250 - protein, 15 aa, synthetic construct
DGESRGSAEQAQIRD

SEQ ID NO: 12251 - protein, 15 aa, synthetic construct
DGFIHSQSGGGPLRR

SEQ ID NO: 12252 - protein, 15 aa, synthetic construct
DGFMQNCDFQIDSFR

SEQ ID NO: 12253 - protein, 15 aa, synthetic construct
DGGACQPDAHDETQH

SEQ ID NO: 12254 - protein, 15 aa, synthetic construct
DGGAGEMRLGRGQLW

SEQ ID NO: 12255 - protein, 15 aa, synthetic construct
DGGCEDARLDEAERR

SEQ ID NO: 12256 - protein, 15 aa, synthetic construct
DGGDAVPRLRPRRLW

SEQ ID NO: 12257 - protein, 15 aa, synthetic construct
DGGDRPVPGAHRALG

SEQ ID NO: 12258 - protein, 14 aa, synthetic construct
DGGEGAAPGQWEGC

SEQ ID NO: 12259 - protein, 15 aa, synthetic construct
DGGGAGAPRSDRSAG

SEQ ID NO: 12260 - protein, 15 aa, synthetic construct
DGGGARAPAAGRESQ

SEQ ID NO: 12261 - protein, 15 aa, synthetic construct
DGGGDGYRAQGGRAG

SEQ ID NO: 12262 - protein, 15 aa, synthetic construct
DGGGGRGRGALSVAR

SEQ ID NO: 12263 - protein, 15 aa, synthetic construct
DGGHQEKDADAEVRQ

SEQ ID NO: 12264 - protein, 15 aa, synthetic construct
DGGKMLHLPEWPEQP

SEQ ID NO: 12265 - protein, 15 aa, synthetic construct
DGGLGGHRRGRGPGP

SEQ ID NO: 12266 - protein, 15 aa, synthetic construct
DGGPVPEHGPLGRLL

SEQ ID NO: 12267 - protein, 15 aa, synthetic construct
DGGRGAGARLASVHG

SEQ ID NO: 12268 - protein, 15 aa, synthetic construct
DGGRGGSGCGELQQR

SEQ ID NO: 12269 - protein, 15 aa, synthetic construct
DGGSQAPKQGGEQPP

SEQ ID NO: 12270 - protein, 15 aa, synthetic construct
DGGSSAQSSPGQRLP

SEQ ID NO: 12271 - protein, 15 aa, synthetic construct
DGGSSHPAERDPHWG

SEQ ID NO: 12272 - protein, 15 aa, synthetic construct
DGISLPMPTVSQLPA

SEQ ID NO: 12273 - protein, 15 aa, synthetic construct
DGKLGGSKTSPHSYC

SEQ ID NO: 12274 - protein, 15 aa, synthetic construct
DGKNKKRDDSDGERA

SEQ ID NO: 12275 - protein, 14 aa, synthetic construct
DGLGAAAAGTPVPA

SEQ ID NO: 12276 - protein, 15 aa, synthetic construct
DGNSGEPNVPEGHFG

SEQ ID NO: 12277 - protein, 15 aa, synthetic construct
DGPHGAGQQRKRAGR

SEQ ID NO: 12278 - protein, 15 aa, synthetic construct
DGPRDARPRRQPLPR

SEQ ID NO: 12279 - protein, 15 aa, synthetic construct
DGPSAAGPRPVLGSG

SEQ ID NO: 12280 - protein, 15 aa, synthetic construct
DGQASQGRLPSQEPR

SEQ ID NO: 12281 - protein, 15 aa, synthetic construct
DGQGRGDCADRPEAG

SEQ ID NO: 12282 - protein, 15 aa, synthetic construct
DGQHPAAAGAPEEAD

SEQ ID NO: 12283 - protein, 15 aa, synthetic construct
DGQLPRARGRGGGPA

SEQ ID NO: 12284 - protein, 15 aa, synthetic construct
DGQRAPDRAHEAPEA

SEQ ID NO: 12285 - protein, 15 aa, synthetic construct
DGQRGRHGPALEHRG

SEQ ID NO: 12286 - protein, 15 aa, synthetic construct
DGQRRQARREDRAGA

SEQ ID NO: 12287 - protein, 15 aa, synthetic construct
DGQRTAARAAARSRS

SEQ ID NO: 12288 - protein, 15 aa, synthetic construct
DGQTDRHRPQPQLPP

SEQ ID NO: 12289 - protein, 15 aa, synthetic construct
DGRAEVAAAAPGSHA

SEQ ID NO: 12290 - protein, 15 aa, synthetic construct
DGREAGAAAHPGGQG

SEQ ID NO: 12291 - protein, 15 aa, synthetic construct
DGRNENPACMHATPG

SEQ ID NO: 12292 - protein, 15 aa, synthetic construct
DGRPEPQQLGGCGGR

SEQ ID NO: 12293 - protein, 15 aa, synthetic construct
DGRPPPGTPACPVRG

SEQ ID NO: 12294 - protein, 15 aa, synthetic construct
DGRPQNDRSARGAVP

SEQ ID NO: 12295 - protein, 15 aa, synthetic construct
DGRRAHRSRGPDRQG

SEQ ID NO: 12296 - protein, 15 aa, synthetic construct
DGRRQQEGGLQKMPE

SEQ ID NO: 12297 - protein, 15 aa, synthetic construct
DGSAGFCGPPDSGSD

SEQ ID NO: 12298 - protein, 15 aa, synthetic construct
DGSGGEDGGRLRPLC

SEQ ID NO: 12299 - protein, 15 aa, synthetic construct
DGSGSGGVSPPSLPP

SEQ ID NO: 12300 - protein, 15 aa, synthetic construct
DGSGSPREAFHWGPQ

SEQ ID NO: 12301 - protein, 15 aa, synthetic construct
DGSLLPAGAASWTPP

SEQ ID NO: 12302 - protein, 15 aa, synthetic construct
DGWRCASGAPSRGPN

SEQ ID NO: 12303 - protein, 15 aa, synthetic construct
DHAGRRCAQDDAAGP

SEQ ID NO: 12304 - protein, 15 aa, synthetic construct
DHARRAQGSAAGART

SEQ ID NO: 12305 - protein, 15 aa, synthetic construct
DHDPPHQSIWDGPTA

SEQ ID NO: 12306 - protein, 15 aa, synthetic construct
DHGSGGGGGTRGRGE

SEQ ID NO: 12307 - protein, 15 aa, synthetic construct
DHGWGQEGTSGPSKH

SEQ ID NO: 12308 - protein, 15 aa, synthetic construct
DHHISANFFLHLWGW

SEQ ID NO: 12309 - protein, 15 aa, synthetic construct
DHNGGRHPAARDAPL

SEQ ID NO: 12310 - protein, 15 aa, synthetic construct
DHNHHLQGSRPQQQE

SEQ ID NO: 12311 - protein, 15 aa, synthetic construct
DHPADRPPGPGAVGL

SEQ ID NO: 12312 - protein, 14 aa, synthetic construct
DHPLSRGAGLPQVQ

SEQ ID NO: 12313 - protein, 15 aa, synthetic construct
DHPPLPGLCLRQLPA

SEQ ID NO: 12314 - protein, 15 aa, synthetic construct
DHRAATQPASLPGLY

SEQ ID NO: 12315 - protein, 15 aa, synthetic construct
DHRAGKGAAGPKSGH

SEQ ID NO: 12316 - protein, 15 aa, synthetic construct
DHREVQPGRREDGEG

SEQ ID NO: 12317 - protein, 15 aa, synthetic construct
DHRGSAGPSIVAAAA

SEQ ID NO: 12318 - protein, 15 aa, synthetic construct
DHRGVPQRGPVLRGQ

SEQ ID NO: 12319 - protein, 15 aa, synthetic construct
DHRQPRWEDNGQKMP

SEQ ID NO: 12320 - protein, 15 aa, synthetic construct
DHTAPGWPPESEFSF

SEQ ID NO: 12321 - protein, 15 aa, synthetic construct
DHVEPPAEAGPHAGT

SEQ ID NO: 12322 - protein, 15 aa, synthetic construct
DHYRLGHLRDAHGRA

SEQ ID NO: 12323 - protein, 15 aa, synthetic construct
DIDGEGRRRAARAVC

SEQ ID NO: 12324 - protein, 15 aa, synthetic construct
DISSVQGGLRQRPAS

SEQ ID NO: 12325 - protein, 12 aa, synthetic construct
DITQQQLHFPSL

SEQ ID NO: 12326 - protein, 15 aa, synthetic construct
DIWRSEDKPQECLLI

SEQ ID NO: 12327 - protein, 15 aa, synthetic construct
DKAASLESPPLLTGN

SEQ ID NO: 12328 - protein, 15 aa, synthetic construct
DKAGAQLPPHSYLQS

SEQ ID NO: 12329 - protein, 15 aa, synthetic construct
DKCQPSCSSPSRGRR

SEQ ID NO: 12330 - protein, 15 aa, synthetic construct
DKETASPTSKKEHSA

SEQ ID NO: 12331 - protein, 15 aa, synthetic construct
DKGAYRSLRESGPTG

SEQ ID NO: 12332 - protein, 12 aa, synthetic construct
DKGPEWNLGDGE

SEQ ID NO: 12333 - protein, 14 aa, synthetic construct
DKKRQTQHCPADGR

SEQ ID NO: 12334 - protein, 15 aa, synthetic construct
DKLQALVFAAAGGSV

SEQ ID NO: 12335 - protein, 15 aa, synthetic construct
DKPGKMGPPQPFGIF

SEQ ID NO: 12336 - protein, 15 aa, synthetic construct
DKRLRHPAREDQHGP

SEQ ID NO: 12337 - protein, 15 aa, synthetic construct
DLADPAQLRPGAAAH

SEQ ID NO: 12338 - protein, 15 aa, synthetic construct
DLAGQRRMDSGRREL

SEQ ID NO: 12339 - protein, 15 aa, synthetic construct
DLAPRGAGGDAAGLE

SEQ ID NO: 12340 - protein, 15 aa, synthetic construct
DLERHGPGRPPARQH

SEQ ID NO: 12341 - protein, 15 aa, synthetic construct
DLGVEAPAARGQAGG

SEQ ID NO: 12342 - protein, 15 aa, synthetic construct
DLLGAWTPVPAAAAA

SEQ ID NO: 12343 - protein, 15 aa, synthetic construct
DLLLCRRQHRDRPGH

SEQ ID NO: 12344 - protein, 15 aa, synthetic construct
DLLPASAGGRAGSAG

SEQ ID NO: 12345 - protein, 15 aa, synthetic construct
DLLQRHQEAEGGPRR

SEQ ID NO: 12346 - protein, 15 aa, synthetic construct
DLPGEILQRGAGERG

SEQ ID NO: 12347 - protein, 15 aa, synthetic construct
DLQKRKTTRPESQGT

SEQ ID NO: 12348 - protein, 15 aa, synthetic construct
DLRAQRGGLGGAERG

SEQ ID NO: 12349 - protein, 15 aa, synthetic construct
DLRESTGKCKPIRCC

SEQ ID NO: 12350 - protein, 15 aa, synthetic construct
DLRGVQRRHEGTDGA

SEQ ID NO: 12351 - protein, 15 aa, synthetic construct
DLRPRPRAPRRPRPR

SEQ ID NO: 12352 - protein, 15 aa, synthetic construct
DLSCRPLRAPVAATA

SEQ ID NO: 12353 - protein, 15 aa, synthetic construct
DLSGSAGGEPAHHCS

SEQ ID NO: 12354 - protein, 15 aa, synthetic construct
DLVAGDALRLLPHAV

SEQ ID NO: 12355 - protein, 15 aa, synthetic construct
DLVGAAGDTALHAAR

SEQ ID NO: 12356 - protein, 15 aa, synthetic construct
DLWLQLHRLWVPPWK

SEQ ID NO: 12357 - protein, 15 aa, synthetic construct
DMPSQCNSELVRGAL

SEQ ID NO: 12358 - protein, 15 aa, synthetic construct
DNAALAAGHDGALRA

SEQ ID NO: 12359 - protein, 15 aa, synthetic construct
DNNGDNFLGASVLGK

SEQ ID NO: 12360 - protein, 13 aa, synthetic construct
DNRENGERGGLHR

SEQ ID NO: 12361 - protein, 15 aa, synthetic construct
DNYSETRSLHAGASL

SEQ ID NO: 12362 - protein, 15 aa, synthetic construct
DPAAAAAPGQPLAQR

SEQ ID NO: 12363 - protein, 15 aa, synthetic construct
DPAAAGSAAVRPRRG

SEQ ID NO: 12364 - protein, 15 aa, synthetic construct
DPAASPGPCPLGQLP

SEQ ID NO: 12365 - protein, 15 aa, synthetic construct
DPADSPGPAGWSAGV

SEQ ID NO: 12366 - protein, 15 aa, synthetic construct
DPADYQSQSLPLTPC

SEQ ID NO: 12367 - protein, 15 aa, synthetic construct
DPAGAPALRARRAGP

SEQ ID NO: 12368 - protein, 15 aa, synthetic construct
DPAGGEQPHHRGDAR

SEQ ID NO: 12369 - protein, 15 aa, synthetic construct
DPALAPGGSHMLRAT

SEQ ID NO: 12370 - protein, 15 aa, synthetic construct
DPALRVGPPQHLLHL

SEQ ID NO: 12371 - protein, 15 aa, synthetic construct
DPAPGEPALQGGLGE

SEQ ID NO: 12372 - protein, 15 aa, synthetic construct
DPARGPNGHGAAGGR

SEQ ID NO: 12373 - protein, 15 aa, synthetic construct
DPDFALPPQSSECSL

SEQ ID NO: 12374 - protein, 15 aa, synthetic construct
DPDGLLSPHPHVLFP

SEQ ID NO: 12375 - protein, 15 aa, synthetic construct
DPDPIVGLCPSPAPP

SEQ ID NO: 12376 - protein, 15 aa, synthetic construct
DPEHVGPQEEGAPRL

SEQ ID NO: 12377 - protein, 15 aa, synthetic construct
DPELAVQPWGPPGLG

SEQ ID NO: 12378 - protein, 15 aa, synthetic construct
DPFGEARQRRLLPRR

SEQ ID NO: 12379 - protein, 15 aa, synthetic construct
DPGAPWMPAGELADV

SEQ ID NO: 12380 - protein, 15 aa, synthetic construct
DPGEEEETGREPQYH

SEQ ID NO: 12381 - protein, 15 aa, synthetic construct
DPGGAPRPRAPRSPT

SEQ ID NO: 12382 - protein, 15 aa, synthetic construct
DPGGEAGRRGRRRGE

SEQ ID NO: 12383 - protein, 15 aa, synthetic construct
DPGHHRATNPEAQED

SEQ ID NO: 12384 - protein, 15 aa, synthetic construct
DPGILSAVPACPRLL

SEQ ID NO: 12385 - protein, 15 aa, synthetic construct
DPGKSHHWSAGRPVR

SEQ ID NO: 12386 - protein, 15 aa, synthetic construct
DPGLSAPAPAPLCGR

SEQ ID NO: 12387 - protein, 15 aa, synthetic construct
DPGLSASSSADPSAR

SEQ ID NO: 12388 - protein, 15 aa, synthetic construct
DPGPAPASSLLYLPA

SEQ ID NO: 12389 - protein, 15 aa, synthetic construct
DPGPGFPWLPGAAAP

SEQ ID NO: 12390 - protein, 15 aa, synthetic construct
DPGPRRAVLGRALRH

SEQ ID NO: 12391 - protein, 15 aa, synthetic construct
DPGRARAEGHAQRHL

SEQ ID NO: 12392 - protein, 15 aa, synthetic construct
DPGSVPAAAGRSWGF

SEQ ID NO: 12393 - protein, 15 aa, synthetic construct
DPGTQQHSPVHLRPQ

SEQ ID NO: 12394 - protein, 15 aa, synthetic construct
DPGVRAAHVAGDRLP

SEQ ID NO: 12395 - protein, 15 aa, synthetic construct
DPIFGARRDRKGLLR

SEQ ID NO: 12396 - protein, 15 aa, synthetic construct
DPKEHCRSYLQPEVC

SEQ ID NO: 12397 - protein, 13 aa, synthetic construct
DPKEPGPGSGNPE

SEQ ID NO: 12398 - protein, 15 aa, synthetic construct
DPKQSSAAGGPRPDC

SEQ ID NO: 12399 - protein, 15 aa, synthetic construct
DPKQSSAAGGPRSDH

SEQ ID NO: 12400 - protein, 15 aa, synthetic construct
DPLARAHRAPGQLEP

SEQ ID NO: 12401 - protein, 15 aa, synthetic construct
DPLEAGRAGVHLPGA

SEQ ID NO: 12402 - protein, 12 aa, synthetic construct
DPLFGLSRDSEQ

SEQ ID NO: 12403 - protein, 15 aa, synthetic construct
DPLRRLAAHGVRLAA

SEQ ID NO: 12404 - protein, 13 aa, synthetic construct
DPNFTDEENEAQR

SEQ ID NO: 12405 - protein, 15 aa, synthetic construct
DPPAARGEGDHQHPG

SEQ ID NO: 12406 - protein, 14 aa, synthetic construct
DPPLALGGEPPDGK

SEQ ID NO: 12407 - protein, 15 aa, synthetic construct
DPPPTQEAAAEGGGG

SEQ ID NO: 12408 - protein, 15 aa, synthetic construct
DPPQAAATAAAAASS

SEQ ID NO: 12409 - protein, 15 aa, synthetic construct
DPPTRGPQWPVAGMQ

SEQ ID NO: 12410 - protein, 12 aa, synthetic construct
DPQELPEPGLHC

SEQ ID NO: 12411 - protein, 15 aa, synthetic construct
DPQFWGHAAEPLTAA

SEQ ID NO: 12412 - protein, 15 aa, synthetic construct
DPQGERGREWGQHAH

SEQ ID NO: 12413 - protein, 15 aa, synthetic construct
DPQLEAPGDPGPLPA

SEQ ID NO: 12414 - protein, 15 aa, synthetic construct
DPQSIAHQTRASGIC

SEQ ID NO: 12415 - protein, 15 aa, synthetic construct
DPRAGAAAAAAARAP

SEQ ID NO: 12416 - protein, 15 aa, synthetic construct
DPREAAFLRAHPPRG

SEQ ID NO: 12417 - protein, 15 aa, synthetic construct
DPRGSADAAGGAGGA

SEQ ID NO: 12418 - protein, 15 aa, synthetic construct
DPRLRVRGGRLLRAG

SEQ ID NO: 12419 - protein, 15 aa, synthetic construct
DPRRSGRAPGAATAA

SEQ ID NO: 12420 - protein, 15 aa, synthetic construct
DPRTALGSERVPWVH

SEQ ID NO: 12421 - protein, 15 aa, synthetic construct
DPSAASLCAASPLAA

SEQ ID NO: 12422 - protein, 15 aa, synthetic construct
DPSEQPPRGRRGRAA

SEQ ID NO: 12423 - protein, 13 aa, synthetic construct
DPSGSHPLPAFAP

SEQ ID NO: 12424 - protein, 15 aa, synthetic construct
DPWHPRNPPNPQDPW

SEQ ID NO: 12425 - protein, 15 aa, synthetic construct
DPYGPSGPAGVDRVP

SEQ ID NO: 12426 - protein, 15 aa, synthetic construct
DQATALGHGGTGAVQ

SEQ ID NO: 12427 - protein, 15 aa, synthetic construct
DQAVLAEAAEEGGGV

SEQ ID NO: 12428 - protein, 15 aa, synthetic construct
DQEDLHKYQGAVEAA

SEQ ID NO: 12429 - protein, 13 aa, synthetic construct
DQGGRSQPPERML

SEQ ID NO: 12430 - protein, 15 aa, synthetic construct
DQGSSHQEASEFPQL

SEQ ID NO: 12431 - protein, 15 aa, synthetic construct
DQHDSVSAGGDKGHD

SEQ ID NO: 12432 - protein, 15 aa, synthetic construct
DQHPQLLPHGVAPQE

SEQ ID NO: 12433 - protein, 15 aa, synthetic construct
DQKESPPWCGRRQDQ

SEQ ID NO: 12434 - protein, 15 aa, synthetic construct
DQNSLGGADATPAGF

SEQ ID NO: 12435 - protein, 15 aa, synthetic construct
DQPRGRSKPGDRLFE

SEQ ID NO: 12436 - protein, 15 aa, synthetic construct
DQRATLQPTFRQGWE

SEQ ID NO: 12437 - protein, 15 aa, synthetic construct
DQRRRAVQPQDVLPA

SEQ ID NO: 12438 - protein, 15 aa, synthetic construct
DQVRLLPCGAGPATE

SEQ ID NO: 12439 - protein, 15 aa, synthetic construct
DRAAERGGAGAVHPL

SEQ ID NO: 12440 - protein, 15 aa, synthetic construct
DRAPRPALAPGPGAM

SEQ ID NO: 12441 - protein, 15 aa, synthetic construct
DRDGGGEGAVSGAGP

SEQ ID NO: 12442 - protein, 15 aa, synthetic construct
DRDHQDPRYLARLRQ

SEQ ID NO: 12443 - protein, 15 aa, synthetic construct
DRDRSPPARPLAPAG

SEQ ID NO: 12444 - protein, 15 aa, synthetic construct
DREFHVRPCGQAQAG

SEQ ID NO: 12445 - protein, 14 aa, synthetic construct
DRELRQSSHCPGGT

SEQ ID NO: 12446 - protein, 13 aa, synthetic construct
DRFRRKEAWAESR

SEQ ID NO: 12447 - protein, 14 aa, synthetic construct
DRGAERAAAERGAE

SEQ ID NO: 12448 - protein, 15 aa, synthetic construct
DRGAGGTRDSAGARP

SEQ ID NO: 12449 - protein, 15 aa, synthetic construct
DRGEDPLTAEGPQAQ

SEQ ID NO: 12450 - protein, 15 aa, synthetic construct
DRGEEDGDALCRQGP

SEQ ID NO: 12451 - protein, 15 aa, synthetic construct
DRGGAGGGPGQAAGR

SEQ ID NO: 12452 - protein, 15 aa, synthetic construct
DRGLHASAGADGRSA

SEQ ID NO: 12453 - protein, 15 aa, synthetic construct
DRGPTGVWAAAGNCT

SEQ ID NO: 12454 - protein, 15 aa, synthetic construct
DRGQQHEQWVLQPGR

SEQ ID NO: 12455 - protein, 15 aa, synthetic construct
DRGRAGVGAPAGAAQ

SEQ ID NO: 12456 - protein, 15 aa, synthetic construct
DRGRRLQLGADHEHR

SEQ ID NO: 12457 - protein, 15 aa, synthetic construct
DRGSAEPAQGSAASW

SEQ ID NO: 12458 - protein, 15 aa, synthetic construct
DRGVPSNAPPVPGQS

SEQ ID NO: 12459 - protein, 15 aa, synthetic construct
DRGYNDFAVSAGSHH

SEQ ID NO: 12460 - protein, 15 aa, synthetic construct
DRHGAAGCPQDPGEP

SEQ ID NO: 12461 - protein, 15 aa, synthetic construct
DRHPAAGEGVHAQRG

SEQ ID NO: 12462 - protein, 15 aa, synthetic construct
DRHPIHEAGTKPPET

SEQ ID NO: 12463 - protein, 15 aa, synthetic construct
DRHRRPAKDFRQKAG

SEQ ID NO: 12464 - protein, 15 aa, synthetic construct
DRKEEVLLSAEPQWP

SEQ ID NO: 12465 - protein, 15 aa, synthetic construct
DRLREAAPRQRGGLL

SEQ ID NO: 12466 - protein, 15 aa, synthetic construct
DRNELPEQRGVGGGL

SEQ ID NO: 12467 - protein, 15 aa, synthetic construct
DRPVHRPGVPLPCPA

SEQ ID NO: 12468 - protein, 15 aa, synthetic construct
DRQPCPEQGHPAAKG

SEQ ID NO: 12469 - protein, 15 aa, synthetic construct
DRQRHSRGGADPVRP

SEQ ID NO: 12470 - protein, 15 aa, synthetic construct
DRQTRREAAGDHEQF

SEQ ID NO: 12471 - protein, 15 aa, synthetic construct
DRQVGEGRGSVPGCP

SEQ ID NO: 12472 - protein, 15 aa, synthetic construct
DRRAAERARGAAPPR

SEQ ID NO: 12473 - protein, 15 aa, synthetic construct
DRRAAPGLLLHGAEG

SEQ ID NO: 12474 - protein, 15 aa, synthetic construct
DRRAGAGRGQSGWSG

SEQ ID NO: 12475 - protein, 15 aa, synthetic construct
DRRALGAAAQGRRAH

SEQ ID NO: 12476 - protein, 15 aa, synthetic construct
DRRAVARGPPAAGEG

SEQ ID NO: 12477 - protein, 15 aa, synthetic construct
DRRDAAAGRGAAQPG

SEQ ID NO: 12478 - protein, 15 aa, synthetic construct
DRRDAAAGRGAGQPG

SEQ ID NO: 12479 - protein, 15 aa, synthetic construct
DRRGGGGGDRSGGAQ

SEQ ID NO: 12480 - protein, 15 aa, synthetic construct
DRRPAPARLQPEGGA

SEQ ID NO: 12481 - protein, 15 aa, synthetic construct
DRRQPDCETTRSRGL

SEQ ID NO: 12482 - protein, 15 aa, synthetic construct
DRRRARGARPEGQLC

SEQ ID NO: 12483 - protein, 14 aa, synthetic construct
DRRSMPNTESETSA

SEQ ID NO: 12484 - protein, 15 aa, synthetic construct
DRSLAAPPESGLGIL

SEQ ID NO: 12485 - protein, 15 aa, synthetic construct
DRSRGAEEGGAAAAA

SEQ ID NO: 12486 - protein, 15 aa, synthetic construct
DRSVAGADSPHGAAS

SEQ ID NO: 12487 - protein, 15 aa, synthetic construct
DRTQEDHGAVSGHAQ

SEQ ID NO: 12488 - protein, 15 aa, synthetic construct
DRVSSAKPNALNKTH

SEQ ID NO: 12489 - protein, 15 aa, synthetic construct
DRVVALPARHTSAPT

SEQ ID NO: 12490 - protein, 12 aa, synthetic construct
DSAAAAAPSPGP

SEQ ID NO: 12491 - protein, 15 aa, synthetic construct
DSAAPRPAAARGCRG

SEQ ID NO: 12492 - protein, 15 aa, synthetic construct
DSASGRVGRGRAGKG

SEQ ID NO: 12493 - protein, 15 aa, synthetic construct
DSAYGVTQQQLHCPS

SEQ ID NO: 12494 - protein, 15 aa, synthetic construct
DSCATAPGLQRACPA

SEQ ID NO: 12495 - protein, 15 aa, synthetic construct
DSDPRHKGRPSEPGR

SEQ ID NO: 12496 - protein, 15 aa, synthetic construct
DSEAAADREAAEQAP

SEQ ID NO: 12497 - protein, 15 aa, synthetic construct
DSEAQPQQEHLADPA

SEQ ID NO: 12498 - protein, 15 aa, synthetic construct
DSEGSAARHGPGPLD

SEQ ID NO: 12499 - protein, 15 aa, synthetic construct
DSEMDFSSSADTSQL

SEQ ID NO: 12500 - protein, 15 aa, synthetic construct
DSEVGRRRQRGGRAQ

SEQ ID NO: 12501 - protein, 15 aa, synthetic construct
DSGDSGFQQPWEATA

SEQ ID NO: 12502 - protein, 15 aa, synthetic construct
DSGGHVQQPVRRDDA

SEQ ID NO: 12503 - protein, 15 aa, synthetic construct
DSGPRARAARRPRPA

SEQ ID NO: 12504 - protein, 15 aa, synthetic construct
DSGRHPGNPAFWETR

SEQ ID NO: 12505 - protein, 15 aa, synthetic construct
DSGRSPRPGHSSGKH

SEQ ID NO: 12506 - protein, 15 aa, synthetic construct
DSGSGVSAADQGPAA

SEQ ID NO: 12507 - protein, 15 aa, synthetic construct
DSGVAGGGGGGWLDC

SEQ ID NO: 12508 - protein, 15 aa, synthetic construct
DSGVRAGPQRAARLC

SEQ ID NO: 12509 - protein, 15 aa, synthetic construct
DSHHPASPPAGHPQR

SEQ ID NO: 12510 - protein, 15 aa, synthetic construct
DSHQDSPLQGGVPQS

SEQ ID NO: 12511 - protein, 15 aa, synthetic construct
DSKAVSAAPQLQPRT

SEQ ID NO: 12512 - protein, 12 aa, synthetic construct
DSKRFFKGTYCF

SEQ ID NO: 12513 - protein, 15 aa, synthetic construct
DSLDHGRPRSGQARK

SEQ ID NO: 12514 - protein, 15 aa, synthetic construct
DSLGAAQDLRVPDAR

SEQ ID NO: 12515 - protein, 15 aa, synthetic construct
DSLHRPRHSTRSRGP

SEQ ID NO: 12516 - protein, 15 aa, synthetic construct
DSLIPGDFNFSFLPS

SEQ ID NO: 12517 - protein, 15 aa, synthetic construct
DSLRAPPPPLDRAHR

SEQ ID NO: 12518 - protein, 15 aa, synthetic construct
DSLSWTSCGSSTTAE

SEQ ID NO: 12519 - protein, 15 aa, synthetic construct
DSLTDPIWRGSSLWS

SEQ ID NO: 12520 - protein, 15 aa, synthetic construct
DSLTRGRSSSSSSSF

SEQ ID NO: 12521 - protein, 15 aa, synthetic construct
DSNLETFAETLVPGH

SEQ ID NO: 12522 - protein, 15 aa, synthetic construct
DSPQRVNFCLHGTQT

SEQ ID NO: 12523 - protein, 15 aa, synthetic construct
DSPRGSPDAGAADAA

SEQ ID NO: 12524 - protein, 13 aa, synthetic construct
DSPTGGIRSTAGD

SEQ ID NO: 12525 - protein, 15 aa, synthetic construct
DSQIGRNWSPSCLSL

SEQ ID NO: 12526 - protein, 15 aa, synthetic construct
DSQKSQSIRPSSSQC

SEQ ID NO: 12527 - protein, 15 aa, synthetic construct
DSQMILNCSPSSLGC

SEQ ID NO: 12528 - protein, 15 aa, synthetic construct
DSRDRGHHRGHLGDC

SEQ ID NO: 12529 - protein, 15 aa, synthetic construct
DSRGDEGDRERGAVG

SEQ ID NO: 12530 - protein, 14 aa, synthetic construct
DSRPEQDVPADQTP

SEQ ID NO: 12531 - protein, 15 aa, synthetic construct
DSSAGPGSSRGPGPG

SEQ ID NO: 12532 - protein, 12 aa, synthetic construct
DSSSGLALTPFG

SEQ ID NO: 12533 - protein, 15 aa, synthetic construct
DSSSTAWKRETKQLF

SEQ ID NO: 12534 - protein, 15 aa, synthetic construct
DSWAPGPHVLGGELK

SEQ ID NO: 12535 - protein, 15 aa, synthetic construct
DSWWRDSERGRPAGP

SEQ ID NO: 12536 - protein, 15 aa, synthetic construct
DTAASVPCGSPGSGS

SEQ ID NO: 12537 - protein, 15 aa, synthetic construct
DTDQSSVRRDSPVPS

SEQ ID NO: 12538 - protein, 15 aa, synthetic construct
DTFATSREFSGALSA

SEQ ID NO: 12539 - protein, 15 aa, synthetic construct
DTGDRGQRIPGAQVA

SEQ ID NO: 12540 - protein, 15 aa, synthetic construct
DTLNGCHAAGEGAPS

SEQ ID NO: 12541 - protein, 15 aa, synthetic construct
DTPMGCSGNLSLCRN

SEQ ID NO: 12542 - protein, 15 aa, synthetic construct
DTQRLWGCWRPGHPH

SEQ ID NO: 12543 - protein, 15 aa, synthetic construct
DVAAFNNNLFDLWNF

SEQ ID NO: 12544 - protein, 15 aa, synthetic construct
DVAPSPPHPAPDCHS

SEQ ID NO: 12545 - protein, 15 aa, synthetic construct
DVCQEPEDRTSKWLW

SEQ ID NO: 12546 - protein, 15 aa, synthetic construct
DVDPSTVLTIRIQEV

SEQ ID NO: 12547 - protein, 15 aa, synthetic construct
DVELHRVGTSLGRQP

SEQ ID NO: 12548 - protein, 15 aa, synthetic construct
DVGAAAGGWRPGPGH

SEQ ID NO: 12549 - protein, 15 aa, synthetic construct
DVGPPRFEGGQAGSR

SEQ ID NO: 12550 - protein, 15 aa, synthetic construct
DVIPARRNPDPALGA

SEQ ID NO: 12551 - protein, 15 aa, synthetic construct
DVLEETPQSPLHWAD

SEQ ID NO: 12552 - protein, 15 aa, synthetic construct
DVLPPARSGPLDLQT

SEQ ID NO: 12553 - protein, 15 aa, synthetic construct
DVLQTSGDPALPTQP

SEQ ID NO: 12554 - protein, 15 aa, synthetic construct
DVQAGHAGRGGPGGL

SEQ ID NO: 12555 - protein, 15 aa, synthetic construct
DVQAVNGAESADHGT

SEQ ID NO: 12556 - protein, 15 aa, synthetic construct
DVRGAALQDRRLLGA

SEQ ID NO: 12557 - protein, 15 aa, synthetic construct
DVSTLEAPHLPRVAG

SEQ ID NO: 12558 - protein, 15 aa, synthetic construct
DVTDSGHMAKSAPPP

SEQ ID NO: 12559 - protein, 15 aa, synthetic construct
DVVQLLPARGEPAAG

SEQ ID NO: 12560 - protein, 15 aa, synthetic construct
DWGSRARGPPAASAR

SEQ ID NO: 12561 - protein, 15 aa, synthetic construct
DWKASNTGFSSPFSL

SEQ ID NO: 12562 - protein, 15 aa, synthetic construct
DWKGSGHLEDASRLR

SEQ ID NO: 12563 - protein, 15 aa, synthetic construct
DWPHPSEGDAGRAAG

SEQ ID NO: 12564 - protein, 15 aa, synthetic construct
DWPRDGPAARGCSRG

SEQ ID NO: 12565 - protein, 15 aa, synthetic construct
DYGDPNVSECMSQKP

SEQ ID NO: 12566 - protein, 15 aa, synthetic construct
DYHTKKRQQPPAWQF

SEQ ID NO: 12567 - protein, 15 aa, synthetic construct
DYTVKGRPSASPSPS

SEQ ID NO: 12568 - protein, 14 aa, synthetic construct
EAAAVGGAEALSGC

SEQ ID NO: 12569 - protein, 14 aa, synthetic construct
EAAGGGAAPAAAVF

SEQ ID NO: 12570 - protein, 13 aa, synthetic construct
EADRQRVAELPRR

SEQ ID NO: 12571 - protein, 14 aa, synthetic construct
EAGNYLPAGDHQPL

SEQ ID NO: 12572 - protein, 14 aa, synthetic construct
EAPACRASSWWKRK

SEQ ID NO: 12573 - protein, 13 aa, synthetic construct
EARRGSPAGLRRP

SEQ ID NO: 12574 - protein, 15 aa, synthetic construct
ECAGNCWARDSEAEE

SEQ ID NO: 12575 - protein, 15 aa, synthetic construct
ECAWRWRGGPASANK

SEQ ID NO: 12576 - protein, 15 aa, synthetic construct
ECDLPTGSPQGAQTL

SEQ ID NO: 12577 - protein, 15 aa, synthetic construct
ECEEGGKHFGSAGGG

SEQ ID NO: 12578 - protein, 14 aa, synthetic construct
ECFVLPALCSANTA

SEQ ID NO: 12579 - protein, 12 aa, synthetic construct
ECLCAEPQQTPG

SEQ ID NO: 12580 - protein, 13 aa, synthetic construct
ECLLVAPEWNAAV

SEQ ID NO: 12581 - protein, 12 aa, synthetic construct
ECQEAAKSVLQK

SEQ ID NO: 12582 - protein, 15 aa, synthetic construct
ECRPSRCLWNPARRS

SEQ ID NO: 12583 - protein, 15 aa, synthetic construct
ECRSRFPAGYGQSVS

SEQ ID NO: 12584 - protein, 14 aa, synthetic construct
ECSGLGTPGACSEA

SEQ ID NO: 12585 - protein, 15 aa, synthetic construct
EDAAAGASQRAPVVL

SEQ ID NO: 12586 - protein, 13 aa, synthetic construct
EDAADHLDCGIPG

SEQ ID NO: 12587 - protein, 15 aa, synthetic construct
EDCCPPLRHFLLYEP

SEQ ID NO: 12588 - protein, 15 aa, synthetic construct
EDCGAGPCAAAESKM

SEQ ID NO: 12589 - protein, 15 aa, synthetic construct
EDETLQALSHVLYGR

SEQ ID NO: 12590 - protein, 12 aa, synthetic construct
EDFDTWYFSVFM

SEQ ID NO: 12591 - protein, 15 aa, synthetic construct
EDFPLSLCRALLSDP

SEQ ID NO: 12592 - protein, 15 aa, synthetic construct
EDGAQHRGPGLGPLL

SEQ ID NO: 12593 - protein, 13 aa, synthetic construct
EDGGGGSGAAARA

SEQ ID NO: 12594 - protein, 15 aa, synthetic construct
EDGGSHRQQGSLPGL

SEQ ID NO: 12595 - protein, 15 aa, synthetic construct
EDGTNRVNRRKTALA

SEQ ID NO: 12596 - protein, 12 aa, synthetic construct
EDGTQEDDLIVQ

SEQ ID NO: 12597 - protein, 15 aa, synthetic construct
EDHKAETCQEASWLL

SEQ ID NO: 12598 - protein, 15 aa, synthetic construct
EDHRHPCCHSPGGPA

SEQ ID NO: 12599 - protein, 15 aa, synthetic construct
EDHWGSPSALYSGLF

SEQ ID NO: 12600 - protein, 15 aa, synthetic construct
EDIRGQRRRGGYDSG

SEQ ID NO: 12601 - protein, 14 aa, synthetic construct
EDKARFPQDREHLP

SEQ ID NO: 12602 - protein, 15 aa, synthetic construct
EDKGEAGWGPLSALG

SEQ ID NO: 12603 - protein, 15 aa, synthetic construct
EDLGLPAAPRLRIPR

SEQ ID NO: 12604 - protein, 15 aa, synthetic construct
EDLLAVSEQGEGGAY

SEQ ID NO: 12605 - protein, 15 aa, synthetic construct
EDLLLSPFSVLCDLH

SEQ ID NO: 12606 - protein, 15 aa, synthetic construct
EDLRGCHSLLPPHHH

SEQ ID NO: 12607 - protein, 15 aa, synthetic construct
EDLTICLTPSSLLLP

SEQ ID NO: 12608 - protein, 15 aa, synthetic construct
EDPAVPCRVSPAACR

SEQ ID NO: 12609 - protein, 15 aa, synthetic construct
EDPEPSPPGGPPGCG

SEQ ID NO: 12610 - protein, 15 aa, synthetic construct
EDPHSRLLRGPARRA

SEQ ID NO: 12611 - protein, 15 aa, synthetic construct
EDPSRQGGEAAPALP

SEQ ID NO: 12612 - protein, 15 aa, synthetic construct
EDPVDGAVRAVAAVA

SEQ ID NO: 12613 - protein, 12 aa, synthetic construct
EDQGVLGNAVTN

SEQ ID NO: 12614 - protein, 15 aa, synthetic construct
EDQRRAPRAGKAPKQ

SEQ ID NO: 12615 - protein, 15 aa, synthetic construct
EDRARQPGAPGGADQ

SEQ ID NO: 12616 - protein, 15 aa, synthetic construct
EDRLPAVRSRLRSGP

SEQ ID NO: 12617 - protein, 15 aa, synthetic construct
EDRNSATVPGNSSWI

SEQ ID NO: 12618 - protein, 15 aa, synthetic construct
EDRREHQRNRQRRAA

SEQ ID NO: 12619 - protein, 15 aa, synthetic construct
EDSAVPGASGPTGAR

SEQ ID NO: 12620 - protein, 15 aa, synthetic construct
EDSHSVSASALGSLP

SEQ ID NO: 12621 - protein, 15 aa, synthetic construct
EDSIAAPCSPGCGYR

SEQ ID NO: 12622 - protein, 15 aa, synthetic construct
EDSKQHSSDRIYPPW

SEQ ID NO: 12623 - protein, 15 aa, synthetic construct
EDSREEEGPQVCRCG

SEQ ID NO: 12624 - protein, 15 aa, synthetic construct
EDTLYFSDLCLHCVL

SEQ ID NO: 12625 - protein, 15 aa, synthetic construct
EEAAAAAPRGIAATS

SEQ ID NO: 12626 - protein, 15 aa, synthetic construct
EEAAHKSACSCSLEC

SEQ ID NO: 12627 - protein, 15 aa, synthetic construct
EEAAPQAGRLQVAGH

SEQ ID NO: 12628 - protein, 15 aa, synthetic construct
EEAERADSVPHRLHL

SEQ ID NO: 12629 - protein, 15 aa, synthetic construct
EEAEVHREELAAEVL

SEQ ID NO: 12630 - protein, 15 aa, synthetic construct
EEAHALPAVLMGHGG

SEQ ID NO: 12631 - protein, 15 aa, synthetic construct
EEAHHDPQHLPLRHQ

SEQ ID NO: 12632 - protein, 15 aa, synthetic construct
EEAPAGLGPGLLPLS

SEQ ID NO: 12633 - protein, 15 aa, synthetic construct
EEAPQFWETPGPGAP

SEQ ID NO: 12634 - protein, 15 aa, synthetic construct
EEARENSSKQASVGL

SEQ ID NO: 12635 - protein, 15 aa, synthetic construct
EEARQQDRAPGGHER

SEQ ID NO: 12636 - protein, 13 aa, synthetic construct
EEDPEHNLAASLA

SEQ ID NO: 12637 - protein, 15 aa, synthetic construct
EEDPRQCHRHPDRSL

SEQ ID NO: 12638 - protein, 15 aa, synthetic construct
EEDQALGAAVDALCL

SEQ ID NO: 12639 - protein, 15 aa, synthetic construct
EEEAAASRRRRGSLA

SEQ ID NO: 12640 - protein, 13 aa, synthetic construct
EEEAAEDGGSSTL

SEQ ID NO: 12641 - protein, 15 aa, synthetic construct
EEEPGAPLSSGLSSQ

SEQ ID NO: 12642 - protein, 15 aa, synthetic construct
EEERGGWLPESGGDA

SEQ ID NO: 12643 - protein, 15 aa, synthetic construct
EEFQDMGLEGAGGAI

SEQ ID NO: 12644 - protein, 12 aa, synthetic construct
EEGRERSDQEQV

SEQ ID NO: 12645 - protein, 15 aa, synthetic construct
EEHLLSYSEACQFCN

SEQ ID NO: 12646 - protein, 15 aa, synthetic construct
EEKELHRSVRIHFLG

SEQ ID NO: 12647 - protein, 15 aa, synthetic construct
EEKWCSFPLGHHLAG

SEQ ID NO: 12648 - protein, 15 aa, synthetic construct
EELERAPRRGARRDL

SEQ ID NO: 12649 - protein, 15 aa, synthetic construct
EEMEVKTFPKATKLV

SEQ ID NO: 12650 - protein, 15 aa, synthetic construct
EENEHTAPCELIFSL

SEQ ID NO: 12651 - protein, 15 aa, synthetic construct
EENRGPEEMGGVPGK

SEQ ID NO: 12652 - protein, 15 aa, synthetic construct
EEPDPSCHPGRLSGS

SEQ ID NO: 12653 - protein, 14 aa, synthetic construct
EEPFAFLGSPGGFY

SEQ ID NO: 12654 - protein, 15 aa, synthetic construct
EEPLPEPDCIRRGVS

SEQ ID NO: 12655 - protein, 15 aa, synthetic construct
EEPQVPPEEAGRARP

SEQ ID NO: 12656 - protein, 15 aa, synthetic construct
EEPRPLHPHVGTEPG

SEQ ID NO: 12657 - protein, 15 aa, synthetic construct
EEQARHPGVGAQVRG

SEQ ID NO: 12658 - protein, 15 aa, synthetic construct
EEQQQQQQQQRERQQ

SEQ ID NO: 12659 - protein, 15 aa, synthetic construct
EERAAEEESVRGRRG

SEQ ID NO: 12660 - protein, 15 aa, synthetic construct
EERERRLGAGCAAVR

SEQ ID NO: 12661 - protein, 15 aa, synthetic construct
EERFFDLCSPPQGAR

SEQ ID NO: 12662 - protein, 15 aa, synthetic construct
EERFSTKNILQSKDT

SEQ ID NO: 12663 - protein, 15 aa, synthetic construct
EERGGPGVPHHRRRQ

SEQ ID NO: 12664 - protein, 15 aa, synthetic construct
EERGRADRHGRVRHR

SEQ ID NO: 12665 - protein, 15 aa, synthetic construct
EERKGSPVQSLQGPA

SEQ ID NO: 12666 - protein, 15 aa, synthetic construct
EERLAADHAPRACTP

SEQ ID NO: 12667 - protein, 15 aa, synthetic construct
EERQGADLPVLTPHP

SEQ ID NO: 12668 - protein, 15 aa, synthetic construct
EERQQEGDTQAGIHG

SEQ ID NO: 12669 - protein, 15 aa, synthetic construct
EESCPGPECDSHGPR

SEQ ID NO: 12670 - protein, 15 aa, synthetic construct
EESPERGTEEEEPEE

SEQ ID NO: 12671 - protein, 15 aa, synthetic construct
EETEAQGFQRACPGV

SEQ ID NO: 12672 - protein, 15 aa, synthetic construct
EETEFVVAAEQGLSA

SEQ ID NO: 12673 - protein, 15 aa, synthetic construct
EETYGNLCLAAPEEG

SEQ ID NO: 12674 - protein, 15 aa, synthetic construct
EEVQIGRAAATTGRG

SEQ ID NO: 12675 - protein, 15 aa, synthetic construct
EEVQQRLRAAAVAAA

SEQ ID NO: 12676 - protein, 15 aa, synthetic construct
EEWRRAQGQQRRGVP

SEQ ID NO: 12677 - protein, 15 aa, synthetic construct
EFGAGLRLRARALSC

SEQ ID NO: 12678 - protein, 13 aa, synthetic construct
EFGERVVKRNPCF

SEQ ID NO: 12679 - protein, 14 aa, synthetic construct
EFLRQVPTAEPGKL

SEQ ID NO: 12680 - protein, 13 aa, synthetic construct
EFPDRLQHHDYLP

SEQ ID NO: 12681 - protein, 15 aa, synthetic construct
EGAEGLAPVPADAGP

SEQ ID NO: 12682 - protein, 15 aa, synthetic construct
EGALRRRRRRRGWPW

SEQ ID NO: 12683 - protein, 15 aa, synthetic construct
EGAPWLVPVLWGLPP

SEQ ID NO: 12684 - protein, 15 aa, synthetic construct
EGARPQQQQQRVLCD

SEQ ID NO: 12685 - protein, 15 aa, synthetic construct
EGARRGPGRAGQAGH

SEQ ID NO: 12686 - protein, 14 aa, synthetic construct
EGASVAGLALAQSC

SEQ ID NO: 12687 - protein, 15 aa, synthetic construct
EGEPCPPAGGPHPVL

SEQ ID NO: 12688 - protein, 13 aa, synthetic construct
EGETGPPASRGQM

SEQ ID NO: 12689 - protein, 15 aa, synthetic construct
EGGCASGLHEESESF

SEQ ID NO: 12690 - protein, 15 aa, synthetic construct
EGGGQRQLPGAAGPP

SEQ ID NO: 12691 - protein, 15 aa, synthetic construct
EGGHCGYLPPCDHPL

SEQ ID NO: 12692 - protein, 15 aa, synthetic construct
EGGQRTKATEMHRRI

SEQ ID NO: 12693 - protein, 12 aa, synthetic construct
EGGRHCDPVGKK

SEQ ID NO: 12694 - protein, 15 aa, synthetic construct
EGGRTPAARPRRPGG

SEQ ID NO: 12695 - protein, 14 aa, synthetic construct
EGGSSCGGRTRIPR

SEQ ID NO: 12696 - protein, 15 aa, synthetic construct
EGGTLEEGPLGVPEL

SEQ ID NO: 12697 - protein, 15 aa, synthetic construct
EGHRQRVLLPPPMRL

SEQ ID NO: 12698 - protein, 15 aa, synthetic construct
EGKRQRNHLLAGLLC

SEQ ID NO: 12699 - protein, 15 aa, synthetic construct
EGLFSVCCSLLFGPN

SEQ ID NO: 12700 - protein, 12 aa, synthetic construct
EGQRGLQGPATH

SEQ ID NO: 12701 - protein, 13 aa, synthetic construct
EGRGAARHPGQRH

SEQ ID NO: 12702 - protein, 15 aa, synthetic construct
EGRGSSTGCCHPPGS

SEQ ID NO: 12703 - protein, 12 aa, synthetic construct
EGRLEPRKFHCK

SEQ ID NO: 12704 - protein, 15 aa, synthetic construct
EGRRGGRGRAGPAEP

SEQ ID NO: 12705 - protein, 15 aa, synthetic construct
EGRSAQKVGAVGRPQ

SEQ ID NO: 12706 - protein, 15 aa, synthetic construct
EGRSGGGGRGRGAPA

SEQ ID NO: 12707 - protein, 15 aa, synthetic construct
EGYFFPVYHSQSEEV

SEQ ID NO: 12708 - protein, 15 aa, synthetic construct
EHFLLGHSMDLPGCP

SEQ ID NO: 12709 - protein, 15 aa, synthetic construct
EHFSFGCCGAALATP

SEQ ID NO: 12710 - protein, 12 aa, synthetic construct
EHGDWTSPRRKG

SEQ ID NO: 12711 - protein, 15 aa, synthetic construct
EHGGGRGHHFLCATL

SEQ ID NO: 12712 - protein, 15 aa, synthetic construct
EHGRPGPGGARGRRA

SEQ ID NO: 12713 - protein, 15 aa, synthetic construct
EHGRWWPSLPGTSVP

SEQ ID NO: 12714 - protein, 15 aa, synthetic construct
EHPPTRRAPEPRRRG

SEQ ID NO: 12715 - protein, 15 aa, synthetic construct
EHQRCQGVSGPEGNP

SEQ ID NO: 12716 - protein, 15 aa, synthetic construct
EHRAPRRAGGGRDAG

SEQ ID NO: 12717 - protein, 15 aa, synthetic construct
EHRDPGGTDGAAAGL

SEQ ID NO: 12718 - protein, 15 aa, synthetic construct
EHRDQDVPALRPLAG

SEQ ID NO: 12719 - protein, 13 aa, synthetic construct
EHRPAVQEQAGDP

SEQ ID NO: 12720 - protein, 15 aa, synthetic construct
EHRRGVPHPAQLPLE

SEQ ID NO: 12721 - protein, 15 aa, synthetic construct
EHRRLPHLQPPGEDD

SEQ ID NO: 12722 - protein, 15 aa, synthetic construct
EHYYEAKIPIYKFPK

SEQ ID NO: 12723 - protein, 13 aa, synthetic construct
EIALPAVGISHVQ

SEQ ID NO: 12724 - protein, 15 aa, synthetic construct
EILQLHSGLSPISLR

SEQ ID NO: 12725 - protein, 15 aa, synthetic construct
EISNRDAKKTGELGS

SEQ ID NO: 12726 - protein, 12 aa, synthetic construct
EISPRAGVPLPP

SEQ ID NO: 12727 - protein, 15 aa, synthetic construct
EIYHSPLLGSCSRGP

SEQ ID NO: 12728 - protein, 15 aa, synthetic construct
EKALPCIRFFWGFGD

SEQ ID NO: 12729 - protein, 15 aa, synthetic construct
EKAQNGPLGQAQRQP

SEQ ID NO: 12730 - protein, 15 aa, synthetic construct
EKARGRELRRRGRVL

SEQ ID NO: 12731 - protein, 15 aa, synthetic construct
EKDEQECFATNGGGG

SEQ ID NO: 12732 - protein, 15 aa, synthetic construct
EKDMQQKSKKRKQLY

SEQ ID NO: 12733 - protein, 15 aa, synthetic construct
EKERQHHRVRPGAQL

SEQ ID NO: 12734 - protein, 15 aa, synthetic construct
EKGNPARSGAVPGDR

SEQ ID NO: 12735 - protein, 15 aa, synthetic construct
EKGRLFRFLQTPAEY

SEQ ID NO: 12736 - protein, 15 aa, synthetic construct
EKGSGCSCPFRFQGS

SEQ ID NO: 12737 - protein, 15 aa, synthetic construct
EKICILQGGPSHLLD

SEQ ID NO: 12738 - protein, 15 aa, synthetic construct
EKLLEASLEEVVREE

SEQ ID NO: 12739 - protein, 15 aa, synthetic construct
EKLLLRETEPGPAAA

SEQ ID NO: 12740 - protein, 15 aa, synthetic construct
EKLQNGPGRQCAGAG

SEQ ID NO: 12741 - protein, 15 aa, synthetic construct
EKNIYLQTGQGDLQG

SEQ ID NO: 12742 - protein, 14 aa, synthetic construct
ELAEAERAERQEAQ

SEQ ID NO: 12743 - protein, 15 aa, synthetic construct
ELAGHFQNGGVWSER

SEQ ID NO: 12744 - protein, 12 aa, synthetic construct
ELCAMERRQGQI

SEQ ID NO: 12745 - protein, 15 aa, synthetic construct
ELFQNSCTSGPQKAD

SEQ ID NO: 12746 - protein, 15 aa, synthetic construct
ELGAAAVAAGAVRAA

SEQ ID NO: 12747 - protein, 15 aa, synthetic construct
ELGAGGGTGGGADTR

SEQ ID NO: 12748 - protein, 13 aa, synthetic construct
ELGGQHAEDPLPP

SEQ ID NO: 12749 - protein, 12 aa, synthetic construct
ELGLGAPQGAPG

SEQ ID NO: 12750 - protein, 15 aa, synthetic construct
ELGLQHLHQQAHQGG

SEQ ID NO: 12751 - protein, 15 aa, synthetic construct
ELGSSVGSRGCEIWA

SEQ ID NO: 12752 - protein, 15 aa, synthetic construct
ELHAVQQGPLVRAVG

SEQ ID NO: 12753 - protein, 15 aa, synthetic construct
ELHFRKQHTSILSRQ

SEQ ID NO: 12754 - protein, 15 aa, synthetic construct
ELHSGFQAAARGCTQ

SEQ ID NO: 12755 - protein, 15 aa, synthetic construct
ELLELCSRHREAAAL

SEQ ID NO: 12756 - protein, 15 aa, synthetic construct
ELLFTPSEQHSVCLD

SEQ ID NO: 12757 - protein, 15 aa, synthetic construct
ELLLRQPPVLQIQSR

SEQ ID NO: 12758 - protein, 15 aa, synthetic construct
ELLRPAGALPTSLQP

SEQ ID NO: 12759 - protein, 15 aa, synthetic construct
ELLTHVHRAGQHRHP

SEQ ID NO: 12760 - protein, 15 aa, synthetic construct
ELPAAAGQLGCHPGR

SEQ ID NO: 12761 - protein, 15 aa, synthetic construct
ELPAAPPVGQQLYGQ

SEQ ID NO: 12762 - protein, 15 aa, synthetic construct
ELPEPTAAAATPPRR

SEQ ID NO: 12763 - protein, 15 aa, synthetic construct
ELPGGRGAEPAAAAE

SEQ ID NO: 12764 - protein, 13 aa, synthetic construct
ELPGPRVPTEPRA

SEQ ID NO: 12765 - protein, 15 aa, synthetic construct
ELPQKFPAAWASGGA

SEQ ID NO: 12766 - protein, 15 aa, synthetic construct
ELPRARLLRAAASPG

SEQ ID NO: 12767 - protein, 15 aa, synthetic construct
ELPRQGVRLWGRFRP

SEQ ID NO: 12768 - protein, 15 aa, synthetic construct
ELQRLRRGPRGGAGL

SEQ ID NO: 12769 - protein, 15 aa, synthetic construct
ELRAALAGPTARPGP

SEQ ID NO: 12770 - protein, 15 aa, synthetic construct
ELRGAGGPCPARRAR

SEQ ID NO: 12771 - protein, 15 aa, synthetic construct
ELRGALPVPPARRGG

SEQ ID NO: 12772 - protein, 15 aa, synthetic construct
ELRGDPEAGWWAAQL

SEQ ID NO: 12773 - protein, 15 aa, synthetic construct
ELRLPAAPVAAAAVR

SEQ ID NO: 12774 - protein, 15 aa, synthetic construct
ELRPPPSRCGGYDLP

SEQ ID NO: 12775 - protein, 15 aa, synthetic construct
ELRPPPSRRGRHDHP

SEQ ID NO: 12776 - protein, 15 aa, synthetic construct
ELRPRHHRLLARRPP

SEQ ID NO: 12777 - protein, 15 aa, synthetic construct
ELRRGGGGSPPLAAA

SEQ ID NO: 12778 - protein, 15 aa, synthetic construct
ELSAAAVALATLSWS

SEQ ID NO: 12779 - protein, 15 aa, synthetic construct
ELSAVLGALEPCLAA

SEQ ID NO: 12780 - protein, 15 aa, synthetic construct
ELSGCYVPSLWSSAA

SEQ ID NO: 12781 - protein, 15 aa, synthetic construct
ELSLGVEPCGRHRCT

SEQ ID NO: 12782 - protein, 12 aa, synthetic construct
ELVQRLPALQLR

SEQ ID NO: 12783 - protein, 15 aa, synthetic construct
EMLLHRSQGRTVTHR

SEQ ID NO: 12784 - protein, 15 aa, synthetic construct
EMLWLDLTASCTGAS

SEQ ID NO: 12785 - protein, 15 aa, synthetic construct
ENCDGGSLSADRLCG

SEQ ID NO: 12786 - protein, 15 aa, synthetic construct
ENGCRKSLYSDRVHS

SEQ ID NO: 12787 - protein, 15 aa, synthetic construct
ENHPAKNAQFYLLGN

SEQ ID NO: 12788 - protein, 15 aa, synthetic construct
ENPHHPHCCSPRGPP

SEQ ID NO: 12789 - protein, 15 aa, synthetic construct
ENWHPNSRPWALGCD

SEQ ID NO: 12790 - protein, 13 aa, synthetic construct
EPEGHAGASVCRR

SEQ ID NO: 12791 - protein, 12 aa, synthetic construct
EPEGPLPGLQPE

SEQ ID NO: 12792 - protein, 14 aa, synthetic construct
EPGCSALNEQTLCM

SEQ ID NO: 12793 - protein, 14 aa, synthetic construct
EPGHRGGYEGGGAE

SEQ ID NO: 12794 - protein, 15 aa, synthetic construct
EPGQSPRLYSDGRRD

SEQ ID NO: 12795 - protein, 14 aa, synthetic construct
EPHNGHRVCPPGPF

SEQ ID NO: 12796 - protein, 15 aa, synthetic construct
EPPASACTAAAAAQG

SEQ ID NO: 12797 - protein, 15 aa, synthetic construct
EPPGGRHEFWTLQES

SEQ ID NO: 12798 - protein, 15 aa, synthetic construct
EPPIHLQVGSCRQGG

SEQ ID NO: 12799 - protein, 15 aa, synthetic construct
EPPLAAARPPPALRP

SEQ ID NO: 12800 - protein, 15 aa, synthetic construct
EPPRGLVSLRGLRAA

SEQ ID NO: 12801 - protein, 15 aa, synthetic construct
EPPTDPFPPRGAPGL

SEQ ID NO: 12802 - protein, 12 aa, synthetic construct
EPQGPVPGLQPQ

SEQ ID NO: 12803 - protein, 15 aa, synthetic construct
EQAEPGIVRAASRAG

SEQ ID NO: 12804 - protein, 15 aa, synthetic construct
EQARPGQAGPEGPDW

SEQ ID NO: 12805 - protein, 15 aa, synthetic construct
EQASAPPEEAAAASP

SEQ ID NO: 12806 - protein, 15 aa, synthetic construct
EQASVQNMSEGGDGQ

SEQ ID NO: 12807 - protein, 15 aa, synthetic construct
EQDAGFRCPQRGAAG

SEQ ID NO: 12808 - protein, 15 aa, synthetic construct
EQDLYDFLYGGVGRT

SEQ ID NO: 12809 - protein, 15 aa, synthetic construct
EQEEETVPRDARAPR

SEQ ID NO: 12810 - protein, 14 aa, synthetic construct
EQFPGLSGLPCYRL

SEQ ID NO: 12811 - protein, 15 aa, synthetic construct
EQGAGSNGAWSFRGR

SEQ ID NO: 12812 - protein, 14 aa, synthetic construct
EQGKTQEEYHSEEI

SEQ ID NO: 12813 - protein, 15 aa, synthetic construct
EQGPALGVLAAASGT

SEQ ID NO: 12814 - protein, 15 aa, synthetic construct
EQGRGGEPPSRLPQG

SEQ ID NO: 12815 - protein, 13 aa, synthetic construct
EQHLHPGASHEWE

SEQ ID NO: 12816 - protein, 15 aa, synthetic construct
EQHLSEALGVPRTLS

SEQ ID NO: 12817 - protein, 15 aa, synthetic construct
EQHQERAGAGAEPQA

SEQ ID NO: 12818 - protein, 15 aa, synthetic construct
EQHRRGQCPHHALLL

SEQ ID NO: 12819 - protein, 15 aa, synthetic construct
EQKNKCGCFKGRLAP

SEQ ID NO: 12820 - protein, 15 aa, synthetic construct
EQLGRREAAAAHYQS

SEQ ID NO: 12821 - protein, 15 aa, synthetic construct
EQLPAAGPQPLAAGG

SEQ ID NO: 12822 - protein, 15 aa, synthetic construct
EQLPAGEELVPVLGR

SEQ ID NO: 12823 - protein, 15 aa, synthetic construct
EQLPRAESCRRSPGG

SEQ ID NO: 12824 - protein, 15 aa, synthetic construct
EQLQGHHPLLGSGSM

SEQ ID NO: 12825 - protein, 15 aa, synthetic construct
EQMFLLGWLFPLSLP

SEQ ID NO: 12826 - protein, 15 aa, synthetic construct
EQNMAKKDLGEQPGR

SEQ ID NO: 12827 - protein, 15 aa, synthetic construct
EQPDGRAAQEAAGAG

SEQ ID NO: 12828 - protein, 15 aa, synthetic construct
EQPEAGRRARRQHRH

SEQ ID NO: 12829 - protein, 15 aa, synthetic construct
EQPPAEPPARAQQRR

SEQ ID NO: 12830 - protein, 15 aa, synthetic construct
EQPPQQLGHGEHGAA

SEQ ID NO: 12831 - protein, 15 aa, synthetic construct
EQPPSLPWHQDLRVP

SEQ ID NO: 12832 - protein, 15 aa, synthetic construct
EQPSRGPEPPAAGSA

SEQ ID NO: 12833 - protein, 15 aa, synthetic construct
EQQQRQHHLRQSQAA

SEQ ID NO: 12834 - protein, 15 aa, synthetic construct
EQRADRAQVPMPRAR

SEQ ID NO: 12835 - protein, 15 aa, synthetic construct
EQRAGVQLAQLGLRV

SEQ ID NO: 12836 - protein, 15 aa, synthetic construct
EQRGPGHAGRAESEI

SEQ ID NO: 12837 - protein, 15 aa, synthetic construct
EQRGRDPAAARRPPR

SEQ ID NO: 12838 - protein, 15 aa, synthetic construct
EQRPRAGPGARQPHA

SEQ ID NO: 12839 - protein, 15 aa, synthetic construct
EQRRAERAGGRGARR

SEQ ID NO: 12840 - protein, 15 aa, synthetic construct
EQRRQSREGEHPERG

SEQ ID NO: 12841 - protein, 15 aa, synthetic construct
EQRSRPRPVGGARRA

SEQ ID NO: 12842 - protein, 15 aa, synthetic construct
EQSEEPRVLGLRGSR

SEQ ID NO: 12843 - protein, 15 aa, synthetic construct
EQTEGAAGDSQRGNH

SEQ ID NO: 12844 - protein, 15 aa, synthetic construct
EQTSLQEILQWQEPG

SEQ ID NO: 12845 - protein, 15 aa, synthetic construct
EQTSQQDIWWREPGF

SEQ ID NO: 12846 - protein, 15 aa, synthetic construct
EQTVYRKPQRERRPL

SEQ ID NO: 12847 - protein, 15 aa, synthetic construct
EQVEEEDGLVHVGGH

SEQ ID NO: 12848 - protein, 15 aa, synthetic construct
EQVRDAAAVPAGLPR

SEQ ID NO: 12849 - protein, 15 aa, synthetic construct
EQVSLANESLSAWIC

SEQ ID NO: 12850 - protein, 15 aa, synthetic construct
EQWRRPPAPLGRRLP

SEQ ID NO: 12851 - protein, 15 aa, synthetic construct
ERARGRLCQDSHAQG

SEQ ID NO: 12852 - protein, 15 aa, synthetic construct
ERARQHSTGTYSYSG

SEQ ID NO: 12853 - protein, 15 aa, synthetic construct
ERARRAGGCAAGAPA

SEQ ID NO: 12854 - protein, 15 aa, synthetic construct
ERAVVHRPARPSGLH

SEQ ID NO: 12855 - protein, 15 aa, synthetic construct
ERCCRSKSASCARCW

SEQ ID NO: 12856 - protein, 15 aa, synthetic construct
ERCGQQLPHGLPVRG

SEQ ID NO: 12857 - protein, 15 aa, synthetic construct
ERCHASLNHAPPSNC

SEQ ID NO: 12858 - protein, 15 aa, synthetic construct
ERCRGRGPRGRGARA

SEQ ID NO: 12859 - protein, 14 aa, synthetic construct
EREQRGRELRGLGA

SEQ ID NO: 12860 - protein, 15 aa, synthetic construct
ERGAGADVRSAPSRG

SEQ ID NO: 12861 - protein, 14 aa, synthetic construct
ERGFLSPGPAPSGA

SEQ ID NO: 12862 - protein, 15 aa, synthetic construct
ERGGGEADAGGAGES

SEQ ID NO: 12863 - protein, 15 aa, synthetic construct
ERGGGGSGGYSGPRG

SEQ ID NO: 12864 - protein, 15 aa, synthetic construct
ERGGPGPEVWLWVLF

SEQ ID NO: 12865 - protein, 15 aa, synthetic construct
ERGHPLHRQQDQPHL

SEQ ID NO: 12866 - protein, 15 aa, synthetic construct
ERGLGQSGRRAQQEI

SEQ ID NO: 12867 - protein, 15 aa, synthetic construct
ERGLHRGRPAGLCSG

SEQ ID NO: 12868 - protein, 15 aa, synthetic construct
ERGLPRRAGRDHRVR

SEQ ID NO: 12869 - protein, 15 aa, synthetic construct
ERGQPTVLRLLQPQP

SEQ ID NO: 12870 - protein, 15 aa, synthetic construct
ERGRATAEHQRGAVR

SEQ ID NO: 12871 - protein, 15 aa, synthetic construct
ERGRHLLRDHQTDLR

SEQ ID NO: 12872 - protein, 15 aa, synthetic construct
ERHGDPGGPRVLPTA

SEQ ID NO: 12873 - protein, 15 aa, synthetic construct
ERHPPLAAAPRCAER

SEQ ID NO: 12874 - protein, 15 aa, synthetic construct
ERHRPRRAGRSRQEA

SEQ ID NO: 12875 - protein, 15 aa, synthetic construct
ERHRSGSGGASLPGG

SEQ ID NO: 12876 - protein, 15 aa, synthetic construct
ERHSGEDADGAAGTL

SEQ ID NO: 12877 - protein, 15 aa, synthetic construct
ERKKKERKKGKKKKE

SEQ ID NO: 12878 - protein, 15 aa, synthetic construct
ERLGIGRGSPGALAS

SEQ ID NO: 12879 - protein, 15 aa, synthetic construct
ERLGQAGAGAVAPAA

SEQ ID NO: 12880 - protein, 15 aa, synthetic construct
ERLGRTVLYPARMGA

SEQ ID NO: 12881 - protein, 15 aa, synthetic construct
ERLLQKMQAWVREIC

SEQ ID NO: 12882 - protein, 15 aa, synthetic construct
ERLLRHPVSGQQDQP

SEQ ID NO: 12883 - protein, 15 aa, synthetic construct
ERLQHRGARRALLPG

SEQ ID NO: 12884 - protein, 15 aa, synthetic construct
ERLRALPAHHGCGSC

SEQ ID NO: 12885 - protein, 15 aa, synthetic construct
ERLRGLRRRQRRSKR

SEQ ID NO: 12886 - protein, 15 aa, synthetic construct
ERLRLPLPVHGRPGV

SEQ ID NO: 12887 - protein, 14 aa, synthetic construct
ERPEAQLHLRGLRR

SEQ ID NO: 12888 - protein, 15 aa, synthetic construct
ERPKITLGHPDFLLC

SEQ ID NO: 12889 - protein, 15 aa, synthetic construct
ERPSGPAAAQSAAAR

SEQ ID NO: 12890 - protein, 15 aa, synthetic construct
ERQQQQSGPASLAGF

SEQ ID NO: 12891 - protein, 15 aa, synthetic construct
ERQQRRSRRPRRVLR

SEQ ID NO: 12892 - protein, 15 aa, synthetic construct
ERRAAEGGAASAAAG

SEQ ID NO: 12893 - protein, 12 aa, synthetic construct
ERRAAGAGSWQQ

SEQ ID NO: 12894 - protein, 15 aa, synthetic construct
ERRALQPGRPGARRA

SEQ ID NO: 12895 - protein, 15 aa, synthetic construct
ERRAQGRRSGRRPWP

SEQ ID NO: 12896 - protein, 13 aa, synthetic construct
ERRESASNLSISQ

SEQ ID NO: 12897 - protein, 15 aa, synthetic construct
ERRGAVLRGHAALQG

SEQ ID NO: 12898 - protein, 15 aa, synthetic construct
ERRHPLAHDAGGVRQ

SEQ ID NO: 12899 - protein, 15 aa, synthetic construct
ERRKSIAVRPFHASG

SEQ ID NO: 12900 - protein, 15 aa, synthetic construct
ERRLDGAGWSVANRG

SEQ ID NO: 12901 - protein, 15 aa, synthetic construct
ERRLVTSRGRQPSPQ

SEQ ID NO: 12902 - protein, 14 aa, synthetic construct
ERRNSTVAWSLGFA

SEQ ID NO: 12903 - protein, 15 aa, synthetic construct
ERRPPPAAAGSSRGT

SEQ ID NO: 12904 - protein, 15 aa, synthetic construct
ERRPRPPAQPGNVRQ

SEQ ID NO: 12905 - protein, 15 aa, synthetic construct
ERRRAFGRRPWGLGQ

SEQ ID NO: 12906 - protein, 15 aa, synthetic construct
ERRRGSRLELAIHRP

SEQ ID NO: 12907 - protein, 15 aa, synthetic construct
ERRRHAGCDRSPQDG

SEQ ID NO: 12908 - protein, 15 aa, synthetic construct
ERRRPRAPGGWARAV

SEQ ID NO: 12909 - protein, 15 aa, synthetic construct
ERRRPVGLHPEGRPR

SEQ ID NO: 12910 - protein, 15 aa, synthetic construct
ERRYRAYATPSPQHK

SEQ ID NO: 12911 - protein, 15 aa, synthetic construct
ERSRCRAGPSSRLCR

SEQ ID NO: 12912 - protein, 15 aa, synthetic construct
ERSRRPGLWVPGSPA

SEQ ID NO: 12913 - protein, 15 aa, synthetic construct
ERSRWLWQSQPLQPG

SEQ ID NO: 12914 - protein, 15 aa, synthetic construct
ERTAKNAFSDVGLKY

SEQ ID NO: 12915 - protein, 15 aa, synthetic construct
ERTAQRLPRGVHRGG

SEQ ID NO: 12916 - protein, 14 aa, synthetic construct
ERTGGWPQCRGKLQ

SEQ ID NO: 12917 - protein, 15 aa, synthetic construct
ERWPPPQRGPLSSEV

SEQ ID NO: 12918 - protein, 15 aa, synthetic construct
ESAGACARIGQLVVP

SEQ ID NO: 12919 - protein, 15 aa, synthetic construct
ESARDRGGHPAQGPR

SEQ ID NO: 12920 - protein, 15 aa, synthetic construct
ESARPATQSPEKAAA

SEQ ID NO: 12921 - protein, 14 aa, synthetic construct
ESCGSGKCARAGPA

SEQ ID NO: 12922 - protein, 13 aa, synthetic construct
ESCTPPPGQGSKP

SEQ ID NO: 12923 - protein, 14 aa, synthetic construct
ESCYLCPTFVHLEK

SEQ ID NO: 12924 - protein, 15 aa, synthetic construct
ESDRVLRTDPGGRAV

SEQ ID NO: 12925 - protein, 15 aa, synthetic construct
ESERGQGGGLWGGDP

SEQ ID NO: 12926 - protein, 15 aa, synthetic construct
ESGRWFSPPPGGAPR

SEQ ID NO: 12927 - protein, 15 aa, synthetic construct
ESHCPNLLLSCQQWP

SEQ ID NO: 12928 - protein, 15 aa, synthetic construct
ESHLLNRAGRWRSGG

SEQ ID NO: 12929 - protein, 14 aa, synthetic construct
ESIHFSLFDVLGEI

SEQ ID NO: 12930 - protein, 15 aa, synthetic construct
ESKAKPPSHHHVHVA

SEQ ID NO: 12931 - protein, 15 aa, synthetic construct
ESLCSTSVSAAHSSC

SEQ ID NO: 12932 - protein, 15 aa, synthetic construct
ESLKPSALGAAGNHS

SEQ ID NO: 12933 - protein, 15 aa, synthetic construct
ESLLGALPVSLLLPA

SEQ ID NO: 12934 - protein, 15 aa, synthetic construct
ESLRCRRRFPEELCR

SEQ ID NO: 12935 - protein, 15 aa, synthetic construct
ESLRQLLRRPGLQLW

SEQ ID NO: 12936 - protein, 13 aa, synthetic construct
ESNKEENFLRRRN

SEQ ID NO: 12937 - protein, 15 aa, synthetic construct
ESNSHSPTLGSDTCN

SEQ ID NO: 12938 - protein, 13 aa, synthetic construct
ESPGLGRLSWPGN

SEQ ID NO: 12939 - protein, 15 aa, synthetic construct
ESRQWQHRHRRRGPQ

SEQ ID NO: 12940 - protein, 15 aa, synthetic construct
ESRRTNRDMAYIFGS

SEQ ID NO: 12941 - protein, 15 aa, synthetic construct
ESRTVRGPRCPRRWR

SEQ ID NO: 12942 - protein, 15 aa, synthetic construct
ESSLLGGRRSVSVGL

SEQ ID NO: 12943 - protein, 12 aa, synthetic construct
ESTPDPYLCGSC

SEQ ID NO: 12944 - protein, 12 aa, synthetic construct
ESTSDPYLCCSC

SEQ ID NO: 12945 - protein, 15 aa, synthetic construct
ESWMHAAVCVWLCWR

SEQ ID NO: 12946 - protein, 15 aa, synthetic construct
ETAPWQWRGGQRRSR

SEQ ID NO: 12947 - protein, 15 aa, synthetic construct
ETAWSQPGCRLVLTG

SEQ ID NO: 12948 - protein, 13 aa, synthetic construct
ETCLPRPAVPRGP

SEQ ID NO: 12949 - protein, 15 aa, synthetic construct
ETCQGSGAQCPGVAN

SEQ ID NO: 12950 - protein, 15 aa, synthetic construct
ETDKSDTSDRIPPSG

SEQ ID NO: 12951 - protein, 15 aa, synthetic construct
ETENVSQAVPSKDAW

SEQ ID NO: 12952 - protein, 15 aa, synthetic construct
ETGATHEGVRHPQDT

SEQ ID NO: 12953 - protein, 15 aa, synthetic construct
ETGKAWPRGRPRSRP

SEQ ID NO: 12954 - protein, 15 aa, synthetic construct
ETGSTASCAGRWRTC

SEQ ID NO: 12955 - protein, 15 aa, synthetic construct
ETHGKPSLQKSAASS

SEQ ID NO: 12956 - protein, 15 aa, synthetic construct
ETLRGAPNTVTQAPI

SEQ ID NO: 12957 - protein, 15 aa, synthetic construct
ETNYHPFPLLQAATK

SEQ ID NO: 12958 - protein, 15 aa, synthetic construct
ETPAAGSSYACAPTP

SEQ ID NO: 12959 - protein, 15 aa, synthetic construct
ETPGSCSRRGSGARK

SEQ ID NO: 12960 - protein, 13 aa, synthetic construct
ETPGSSVCSGPAR

SEQ ID NO: 12961 - protein, 15 aa, synthetic construct
ETPMPSGQCAGGACA

SEQ ID NO: 12962 - protein, 15 aa, synthetic construct
ETPPPLAAASLTRVP

SEQ ID NO: 12963 - protein, 15 aa, synthetic construct
ETPQTPHFLALVPGL

SEQ ID NO: 12964 - protein, 15 aa, synthetic construct
ETPVCWDLAQLPARG

SEQ ID NO: 12965 - protein, 15 aa, synthetic construct
ETQKESFLFAEDEAP

SEQ ID NO: 12966 - protein, 15 aa, synthetic construct
ETRCHPHPGHTGSLL

SEQ ID NO: 12967 - protein, 15 aa, synthetic construct
ETRFSSLWFSMGIGD

SEQ ID NO: 12968 - protein, 15 aa, synthetic construct
ETRPLRPLWPPRGRK

SEQ ID NO: 12969 - protein, 15 aa, synthetic construct
ETRPTRCPPRWAHSS

SEQ ID NO: 12970 - protein, 15 aa, synthetic construct
ETRRGTGTATGTGTG

SEQ ID NO: 12971 - protein, 15 aa, synthetic construct
ETRRSIPETPEQHRG

SEQ ID NO: 12972 - protein, 15 aa, synthetic construct
ETRVRRGVPHGEVEP

SEQ ID NO: 12973 - protein, 15 aa, synthetic construct
ETSHPGPPWHLLSHC

SEQ ID NO: 12974 - protein, 15 aa, synthetic construct
ETSLPVSCHPSGHRR

SEQ ID NO: 12975 - protein, 15 aa, synthetic construct
ETSPRTWGWSPGSWR

SEQ ID NO: 12976 - protein, 15 aa, synthetic construct
ETSQALGNKVWCQRF

SEQ ID NO: 12977 - protein, 15 aa, synthetic construct
ETSSKDYLPYVMGYL

SEQ ID NO: 12978 - protein, 15 aa, synthetic construct
ETTKRPRVWGQPWAQ

SEQ ID NO: 12979 - protein, 15 aa, synthetic construct
ETTKTYRFYFFLVFF

SEQ ID NO: 12980 - protein, 15 aa, synthetic construct
ETVSCPRSGRALPQS

SEQ ID NO: 12981 - protein, 12 aa, synthetic construct
EVAAAAGSGGAL

SEQ ID NO: 12982 - protein, 12 aa, synthetic construct
EVAAAAGSGGTL

SEQ ID NO: 12983 - protein, 15 aa, synthetic construct
EVGEASPGRGRAAPE

SEQ ID NO: 12984 - protein, 12 aa, synthetic construct
EVGNLYFPSFSL

SEQ ID NO: 12985 - protein, 15 aa, synthetic construct
EVRRAPLRAHHSRVE

SEQ ID NO: 12986 - protein, 15 aa, synthetic construct
EVRSWHPSRHRPHSG

SEQ ID NO: 12987 - protein, 12 aa, synthetic construct
EVRVCYRRDHQL

SEQ ID NO: 12988 - protein, 15 aa, synthetic construct
EVYWCKDCQGLWVKE

SEQ ID NO: 12989 - protein, 12 aa, synthetic construct
EWGELEPGPAGR

SEQ ID NO: 12990 - protein, 15 aa, synthetic construct
EWGGEGKEEGSRTST

SEQ ID NO: 12991 - protein, 15 aa, synthetic construct
EWRRRRRGLGAQSLR

SEQ ID NO: 12992 - protein, 15 aa, synthetic construct
EWRSRARHEEPAEPG

SEQ ID NO: 12993 - protein, 15 aa, synthetic construct
FAAAPASAAREAAAG

SEQ ID NO: 12994 - protein, 15 aa, synthetic construct
FAASARSEALPTNLS

SEQ ID NO: 12995 - protein, 15 aa, synthetic construct
FAETARTHLQQEDGN

SEQ ID NO: 12996 - protein, 15 aa, synthetic construct
FALRLSTKQFESPSV

SEQ ID NO: 12997 - protein, 15 aa, synthetic construct
FAPGPRRLYGAAGPG

SEQ ID NO: 12998 - protein, 15 aa, synthetic construct
FCNLPSDIVGECTYC

SEQ ID NO: 12999 - protein, 15 aa, synthetic construct
FDGLAAERLCPGSSA

SEQ ID NO: 13000 - protein, 15 aa, synthetic construct
FEAQSHHENARLGMS

SEQ ID NO: 13001 - protein, 15 aa, synthetic construct
FEGRPHGGASAIGRS

SEQ ID NO: 13002 - protein, 15 aa, synthetic construct
FEVAPRVEGELPELA

SEQ ID NO: 13003 - protein, 15 aa, synthetic construct
FGALVAGAGSGRAPG

SEQ ID NO: 13004 - protein, 15 aa, synthetic construct
FGARGDSSQMPSHPH

SEQ ID NO: 13005 - protein, 15 aa, synthetic construct
FGDLAGAGQGEHASA

SEQ ID NO: 13006 - protein, 15 aa, synthetic construct
FGKNRAKAGRGTEPG

SEQ ID NO: 13007 - protein, 15 aa, synthetic construct
FGLSPGADAGPGGRG

SEQ ID NO: 13008 - protein, 15 aa, synthetic construct
FGSPGSSPTQTKDLG

SEQ ID NO: 13009 - protein, 15 aa, synthetic construct
FGSSSKLPAHLAGDP

SEQ ID NO: 13010 - protein, 15 aa, synthetic construct
FHGQRPPVGIPGGGG

SEQ ID NO: 13011 - protein, 15 aa, synthetic construct
FHSGQVLPDPPLHRG

SEQ ID NO: 13012 - protein, 15 aa, synthetic construct
FILGPGGQGPLRPGP

SEQ ID NO: 13013 - protein, 15 aa, synthetic construct
FLARGRRTRRRERRR

SEQ ID NO: 13014 - protein, 15 aa, synthetic construct
FLPALPARAPALPHA

SEQ ID NO: 13015 - protein, 15 aa, synthetic construct
FNTASRAPAAPLPPV

SEQ ID NO: 13016 - protein, 15 aa, synthetic construct
FPAGELPQPPEWPEV

SEQ ID NO: 13017 - protein, 15 aa, synthetic construct
FPGGWASGPAGRSGG

SEQ ID NO: 13018 - protein, 15 aa, synthetic construct
FPGLTGAGRTTWPQG

SEQ ID NO: 13019 - protein, 15 aa, synthetic construct
FPLQQERGCSEASGP

SEQ ID NO: 13020 - protein, 15 aa, synthetic construct
FPPAATVSAIPACRS

SEQ ID NO: 13021 - protein, 15 aa, synthetic construct
FPPGPVQKPALFGLT

SEQ ID NO: 13022 - protein, 15 aa, synthetic construct
FPQAAAAPPAAAAGA

SEQ ID NO: 13023 - protein, 15 aa, synthetic construct
FPVAAGLPAVSPAAA

SEQ ID NO: 13024 - protein, 15 aa, synthetic construct
FPVQAGAGGRRKRGQ

SEQ ID NO: 13025 - protein, 15 aa, synthetic construct
FQGGLWLLWGFQGGL

SEQ ID NO: 13026 - protein, 15 aa, synthetic construct
FQLRHAGLGPDRPAA

SEQ ID NO: 13027 - protein, 15 aa, synthetic construct
FQPAPALHAGQGPQR

SEQ ID NO: 13028 - protein, 15 aa, synthetic construct
FQQHQLPRAQPAAAV

SEQ ID NO: 13029 - protein, 15 aa, synthetic construct
FQREVHPQPLAGGPL

SEQ ID NO: 13030 - protein, 15 aa, synthetic construct
FQSGHERGQAEGARA

SEQ ID NO: 13031 - protein, 15 aa, synthetic construct
FRASPVPAAAAPGAL

SEQ ID NO: 13032 - protein, 15 aa, synthetic construct
FREYWSFCDLCALLP

SEQ ID NO: 13033 - protein, 15 aa, synthetic construct
FRLDAAGRALPERCP

SEQ ID NO: 13034 - protein, 15 aa, synthetic construct
FSGAMASSSAQLPAP

SEQ ID NO: 13035 - protein, 15 aa, synthetic construct
FSNLHPDSAGKPAYF

SEQ ID NO: 13036 - protein, 15 aa, synthetic construct
FSSAPRSLGGGERPA

SEQ ID NO: 13037 - protein, 15 aa, synthetic construct
FSSPRPGPAGLPAAP

SEQ ID NO: 13038 - protein, 15 aa, synthetic construct
FSVRARPPGLRGAHE

SEQ ID NO: 13039 - protein, 15 aa, synthetic construct
FTPQHCACGTIWIAF

SEQ ID NO: 13040 - protein, 15 aa, synthetic construct
FTTPASTAKNSSWDT

SEQ ID NO: 13041 - protein, 15 aa, synthetic construct
FVPMGSGTGSEEPLG

SEQ ID NO: 13042 - protein, 15 aa, synthetic construct
FVPRGPTPPPQKAGH

SEQ ID NO: 13043 - protein, 15 aa, synthetic construct
FWGRRVWRLRIHATR

SEQ ID NO: 13044 - protein, 15 aa, synthetic construct
FYLQNLTQKSKKATR

SEQ ID NO: 13045 - protein, 15 aa, synthetic construct
GAAAAAARGAAAVTD

SEQ ID NO: 13046 - protein, 12 aa, synthetic construct
GAAAAAATATAK

SEQ ID NO: 13047 - protein, 15 aa, synthetic construct
GAAAAAGRAQERGGA

SEQ ID NO: 13048 - protein, 15 aa, synthetic construct
GAAAAEAGARRPAGP

SEQ ID NO: 13049 - protein, 15 aa, synthetic construct
GAAAAGGHPAAGAQL

SEQ ID NO: 13050 - protein, 15 aa, synthetic construct
GAAAAGPLGAGAGRR

SEQ ID NO: 13051 - protein, 15 aa, synthetic construct
GAAAAPAPARQRGLL

SEQ ID NO: 13052 - protein, 15 aa, synthetic construct
GAAAARRAAHRDPAG

SEQ ID NO: 13053 - protein, 15 aa, synthetic construct
GAAADGGRTVPRPDR

SEQ ID NO: 13054 - protein, 15 aa, synthetic construct
GAAAGARRGRADGHG

SEQ ID NO: 13055 - protein, 15 aa, synthetic construct
GAAAGDPHPGAGELG

SEQ ID NO: 13056 - protein, 15 aa, synthetic construct
GAAAGIDPADPGAGC

SEQ ID NO: 13057 - protein, 15 aa, synthetic construct
GAAARSRGRPVRAAA

SEQ ID NO: 13058 - protein, 15 aa, synthetic construct
GAAASAAGATAAGGP

SEQ ID NO: 13059 - protein, 15 aa, synthetic construct
GAAASEPGRSCQGPA

SEQ ID NO: 13060 - protein, 15 aa, synthetic construct
GAADAAELVGDLPQD

SEQ ID NO: 13061 - protein, 15 aa, synthetic construct
GAAEAAGARRLGPSR

SEQ ID NO: 13062 - protein, 15 aa, synthetic construct
GAAEGGKVRNRQEGK

SEQ ID NO: 13063 - protein, 15 aa, synthetic construct
GAAESLSGEALRVRP

SEQ ID NO: 13064 - protein, 15 aa, synthetic construct
GAAFQDRQGRELPRA

SEQ ID NO: 13065 - protein, 15 aa, synthetic construct
GAAGAGRGGPQRALR

SEQ ID NO: 13066 - protein, 15 aa, synthetic construct
GAAGDAGDCQRGRTR

SEQ ID NO: 13067 - protein, 15 aa, synthetic construct
GAAGDLGGPPPLPLP

SEQ ID NO: 13068 - protein, 15 aa, synthetic construct
GAAGGDGGRSAEHPG

SEQ ID NO: 13069 - protein, 15 aa, synthetic construct
GAAGGPRRGSSGAPA

SEQ ID NO: 13070 - protein, 15 aa, synthetic construct
GAAGKAAQGAEVRPA

SEQ ID NO: 13071 - protein, 15 aa, synthetic construct
GAAGLASTDPGAVSD

SEQ ID NO: 13072 - protein, 15 aa, synthetic construct
GAAGQSCLQCAWCPG

SEQ ID NO: 13073 - protein, 15 aa, synthetic construct
GAAGSGAPAAGKLQP

SEQ ID NO: 13074 - protein, 15 aa, synthetic construct
GAAGSRQPAAGPDGS

SEQ ID NO: 13075 - protein, 15 aa, synthetic construct
GAAGSVAHKPRTGNS

SEQ ID NO: 13076 - protein, 15 aa, synthetic construct
GAANQQCREHGSAAG

SEQ ID NO: 13077 - protein, 15 aa, synthetic construct
GAAPGRRAPRRGPGA

SEQ ID NO: 13078 - protein, 15 aa, synthetic construct
GAARAAAWTGPARRA

SEQ ID NO: 13079 - protein, 15 aa, synthetic construct
GAARAWAPEEPGQNW

SEQ ID NO: 13080 - protein, 15 aa, synthetic construct
GAARGAHGAAAADAG

SEQ ID NO: 13081 - protein, 15 aa, synthetic construct
GAARGGGVGSGRRQR

SEQ ID NO: 13082 - protein, 15 aa, synthetic construct
GAARRGRRARGRRRR

SEQ ID NO: 13083 - protein, 15 aa, synthetic construct
GAARTRRDPRLRPPA

SEQ ID NO: 13084 - protein, 15 aa, synthetic construct
GAARVRTSRPRRWGS

SEQ ID NO: 13085 - protein, 15 aa, synthetic construct
GAASGAERAGPALHP

SEQ ID NO: 13086 - protein, 15 aa, synthetic construct
GAASGAPAAAEAEQA

SEQ ID NO: 13087 - protein, 15 aa, synthetic construct
GAASGPAPSPGPKRG

SEQ ID NO: 13088 - protein, 15 aa, synthetic construct
GAAVAGSAAPATAAA

SEQ ID NO: 13089 - protein, 15 aa, synthetic construct
GACGRGPRAVAPAAL

SEQ ID NO: 13090 - protein, 15 aa, synthetic construct
GACKKAHAIDPLNSL

SEQ ID NO: 13091 - protein, 15 aa, synthetic construct
GACPVHKQRFLRFAG

SEQ ID NO: 13092 - protein, 15 aa, synthetic construct
GADGQLRDDPPGPAR

SEQ ID NO: 13093 - protein, 12 aa, synthetic construct
GADHHSREDRVS

SEQ ID NO: 13094 - protein, 15 aa, synthetic construct
GADLKGKREGTASAL

SEQ ID NO: 13095 - protein, 13 aa, synthetic construct
GADPPCSLSGALP

SEQ ID NO: 13096 - protein, 15 aa, synthetic construct
GADPRPSLPHQRGEL

SEQ ID NO: 13097 - protein, 15 aa, synthetic construct
GADRRQPPLHHAART

SEQ ID NO: 13098 - protein, 12 aa, synthetic construct
GADSKDCGADQA

SEQ ID NO: 13099 - protein, 15 aa, synthetic construct
GAEAAAGRAAEAVGS

SEQ ID NO: 13100 - protein, 15 aa, synthetic construct
GAEAAGCSHRRAGAG

SEQ ID NO: 13101 - protein, 15 aa, synthetic construct
GAEAATATPALRSAA

SEQ ID NO: 13102 - protein, 15 aa, synthetic construct
GAEAEHGAAGAPAAA

SEQ ID NO: 13103 - protein, 15 aa, synthetic construct
GAEAYQRDAQLLDAL

SEQ ID NO: 13104 - protein, 15 aa, synthetic construct
GAEGESSDVGGAGER

SEQ ID NO: 13105 - protein, 15 aa, synthetic construct
GAEGRQATGAGFSSG

SEQ ID NO: 13106 - protein, 15 aa, synthetic construct
GAEGSDRRRQRREGG

SEQ ID NO: 13107 - protein, 15 aa, synthetic construct
GAEHRGDGAVRAGAG

SEQ ID NO: 13108 - protein, 15 aa, synthetic construct
GAEHRGDGAVRAGSG

SEQ ID NO: 13109 - protein, 15 aa, synthetic construct
GAEPGEPGGPAQRGP

SEQ ID NO: 13110 - protein, 14 aa, synthetic construct
GAEPGTRVRPAASP

SEQ ID NO: 13111 - protein, 15 aa, synthetic construct
GAERARAGGHGRRPG

SEQ ID NO: 13112 - protein, 15 aa, synthetic construct
GAERVRGERLPDVGG

SEQ ID NO: 13113 - protein, 15 aa, synthetic construct
GAESIATVGSEGQQR

SEQ ID NO: 13114 - protein, 15 aa, synthetic construct
GAESREQVPAGPEDR

SEQ ID NO: 13115 - protein, 15 aa, synthetic construct
GAESRRAEAEDRGHA

SEQ ID NO: 13116 - protein, 15 aa, synthetic construct
GAESRRVPRAFPLLQ

SEQ ID NO: 13117 - protein, 15 aa, synthetic construct
GAETPGAGRLRGGVL

SEQ ID NO: 13118 - protein, 15 aa, synthetic construct
GAEVAEEVAAQRALD

SEQ ID NO: 13119 - protein, 15 aa, synthetic construct
GAEVELACASRAVSA

SEQ ID NO: 13120 - protein, 15 aa, synthetic construct
GAFADYHLPASRQHQ

SEQ ID NO: 13121 - protein, 15 aa, synthetic construct
GAFSGGGAGVRGRSP

SEQ ID NO: 13122 - protein, 12 aa, synthetic construct
GAGAEGCSRECR

SEQ ID NO: 13123 - protein, 15 aa, synthetic construct
GAGAEPALAAPVSRG

SEQ ID NO: 13124 - protein, 15 aa, synthetic construct
GAGAGAPQTQPGAAA

SEQ ID NO: 13125 - protein, 15 aa, synthetic construct
GAGAGCHCAGCGPLS

SEQ ID NO: 13126 - protein, 15 aa, synthetic construct
GAGAPRRPGGAVAGV

SEQ ID NO: 13127 - protein, 15 aa, synthetic construct
GAGCGGSKGDRSPCV

SEQ ID NO: 13128 - protein, 15 aa, synthetic construct
GAGDAGSTQPPTPRA

SEQ ID NO: 13129 - protein, 15 aa, synthetic construct
GAGDGEGGRTALHGR

SEQ ID NO: 13130 - protein, 15 aa, synthetic construct
GAGDRRIAETAWPSG

SEQ ID NO: 13131 - protein, 15 aa, synthetic construct
GAGDVLLSPGYLLLR

SEQ ID NO: 13132 - protein, 15 aa, synthetic construct
GAGEALRCGEERPPA

SEQ ID NO: 13133 - protein, 15 aa, synthetic construct
GAGEATGGAGGGAGR

SEQ ID NO: 13134 - protein, 15 aa, synthetic construct
GAGEDDQRAASAGGC

SEQ ID NO: 13135 - protein, 15 aa, synthetic construct
GAGEKSISAGKDRGS

SEQ ID NO: 13136 - protein, 15 aa, synthetic construct
GAGERASRIRSPSRC

SEQ ID NO: 13137 - protein, 15 aa, synthetic construct
GAGERGPYREGAAPC

SEQ ID NO: 13138 - protein, 15 aa, synthetic construct
GAGGAQEGDRAAERL

SEQ ID NO: 13139 - protein, 12 aa, synthetic construct
GAGGGEQHGAFG

SEQ ID NO: 13140 - protein, 15 aa, synthetic construct
GAGGGGEEAAARSQR

SEQ ID NO: 13141 - protein, 15 aa, synthetic construct
GAGGRERGRERHPGG

SEQ ID NO: 13142 - protein, 15 aa, synthetic construct
GAGGRGRAPGRRTGP

SEQ ID NO: 13143 - protein, 15 aa, synthetic construct
GAGGRSGGGGGRGGC

SEQ ID NO: 13144 - protein, 15 aa, synthetic construct
GAGGVAGGGTEKAPP

SEQ ID NO: 13145 - protein, 15 aa, synthetic construct
GAGGVGVPEPEPAGG

SEQ ID NO: 13146 - protein, 12 aa, synthetic construct
GAGKGEEFDNKL

SEQ ID NO: 13147 - protein, 15 aa, synthetic construct
GAGKGKPDPVPAGVR

SEQ ID NO: 13148 - protein, 15 aa, synthetic construct
GAGLAALGVSAKECG

SEQ ID NO: 13149 - protein, 15 aa, synthetic construct
GAGLGAGERPEWASS

SEQ ID NO: 13150 - protein, 15 aa, synthetic construct
GAGMRPLHPLQEPAV

SEQ ID NO: 13151 - protein, 15 aa, synthetic construct
GAGPAVGARAGGRWR

SEQ ID NO: 13152 - protein, 15 aa, synthetic construct
GAGPDQAADREGAPA

SEQ ID NO: 13153 - protein, 15 aa, synthetic construct
GAGPEEGRADPPEAP

SEQ ID NO: 13154 - protein, 15 aa, synthetic construct
GAGPPDQRRAPRLPR

SEQ ID NO: 13155 - protein, 15 aa, synthetic construct
GAGPRRPGGAHCARG

SEQ ID NO: 13156 - protein, 15 aa, synthetic construct
GAGRAAAGARPAGPR

SEQ ID NO: 13157 - protein, 13 aa, synthetic construct
GAGRAGVAAAGNL

SEQ ID NO: 13158 - protein, 15 aa, synthetic construct
GAGRGDALVAAAEAA

SEQ ID NO: 13159 - protein, 15 aa, synthetic construct
GAGRGHPAPQLPGAH

SEQ ID NO: 13160 - protein, 15 aa, synthetic construct
GAGRGPSGGGGRPPG

SEQ ID NO: 13161 - protein, 15 aa, synthetic construct
GAGRRGNPERVAGTA

SEQ ID NO: 13162 - protein, 15 aa, synthetic construct
GAGRRRRRCGCRGEP

SEQ ID NO: 13163 - protein, 15 aa, synthetic construct
GAGRRSQAAAAAAAS

SEQ ID NO: 13164 - protein, 15 aa, synthetic construct
GAGRTAGSRKPDPAG

SEQ ID NO: 13165 - protein, 15 aa, synthetic construct
GAGSQAAPSAALGPD

SEQ ID NO: 13166 - protein, 15 aa, synthetic construct
GAGSRRSGPTDREQQ

SEQ ID NO: 13167 - protein, 15 aa, synthetic construct
GAGVAAAGQDPEPRV

SEQ ID NO: 13168 - protein, 15 aa, synthetic construct
GAGVAPGAAPAAPHP

SEQ ID NO: 13169 - protein, 15 aa, synthetic construct
GAGVGGRGLAEPLPG

SEQ ID NO: 13170 - protein, 15 aa, synthetic construct
GAGVGPAGRLPLQPA

SEQ ID NO: 13171 - protein, 15 aa, synthetic construct
GAGVSPGGADPAPGP

SEQ ID NO: 13172 - protein, 15 aa, synthetic construct
GAGWPSAGAERGGGS

SEQ ID NO: 13173 - protein, 15 aa, synthetic construct
GAGWSEARNVSPAGG

SEQ ID NO: 13174 - protein, 15 aa, synthetic construct
GAHGHRAEPAEPHPH

SEQ ID NO: 13175 - protein, 15 aa, synthetic construct
GAHHPDPGPAGGWPQ

SEQ ID NO: 13176 - protein, 15 aa, synthetic construct
GAHTHRVPDPAPPAP

SEQ ID NO: 13177 - protein, 15 aa, synthetic construct
GAHVPAGPWRLRGTW

SEQ ID NO: 13178 - protein, 15 aa, synthetic construct
GAILGGAEEAGNCCL

SEQ ID NO: 13179 - protein, 15 aa, synthetic construct
GAIRAQKPRISSAAL

SEQ ID NO: 13180 - protein, 15 aa, synthetic construct
GAISAPCNLPQEAVE

SEQ ID NO: 13181 - protein, 15 aa, synthetic construct
GAISRRGPQPQPHGP

SEQ ID NO: 13182 - protein, 15 aa, synthetic construct
GAKLGVGGGSGGGGD

SEQ ID NO: 13183 - protein, 15 aa, synthetic construct
GAKSLESAVHCFRPL

SEQ ID NO: 13184 - protein, 15 aa, synthetic construct
GALAAAPVAAGAAPG

SEQ ID NO: 13185 - protein, 15 aa, synthetic construct
GALEEPLPQEPSRVM

SEQ ID NO: 13186 - protein, 15 aa, synthetic construct
GALESSQGCQMPDAG

SEQ ID NO: 13187 - protein, 15 aa, synthetic construct
GALGCRRAAGRAGAG

SEQ ID NO: 13188 - protein, 12 aa, synthetic construct
GALGEERDSGSP

SEQ ID NO: 13189 - protein, 15 aa, synthetic construct
GALGGLPPPLPLLPP

SEQ ID NO: 13190 - protein, 15 aa, synthetic construct
GALGLEIALDRRLAP

SEQ ID NO: 13191 - protein, 15 aa, synthetic construct
GALGLGPQPLAPTGA

SEQ ID NO: 13192 - protein, 15 aa, synthetic construct
GALGQPVSLPGGCGS

SEQ ID NO: 13193 - protein, 15 aa, synthetic construct
GALGTACLIPPAGSG

SEQ ID NO: 13194 - protein, 15 aa, synthetic construct
GALGVCAERLPDAGG

SEQ ID NO: 13195 - protein, 15 aa, synthetic construct
GALHDHCNSAVPETH

SEQ ID NO: 13196 - protein, 15 aa, synthetic construct
GALLRRVGAAGRPRL

SEQ ID NO: 13197 - protein, 15 aa, synthetic construct
GALPGGAGLRAGHER

SEQ ID NO: 13198 - protein, 15 aa, synthetic construct
GALPQPRGHPLRPGG

SEQ ID NO: 13199 - protein, 15 aa, synthetic construct
GALQEVLRWGKLEDE

SEQ ID NO: 13200 - protein, 15 aa, synthetic construct
GALQGVLGSVGCVGL

SEQ ID NO: 13201 - protein, 15 aa, synthetic construct
GALRAARRGGARAAP

SEQ ID NO: 13202 - protein, 15 aa, synthetic construct
GALREAARSGPARRA

SEQ ID NO: 13203 - protein, 15 aa, synthetic construct
GALRESCSSPGSPGA

SEQ ID NO: 13204 - protein, 15 aa, synthetic construct
GALRGRLGGGGGRCP

SEQ ID NO: 13205 - protein, 15 aa, synthetic construct
GALSYSSPQELPREA

SEQ ID NO: 13206 - protein, 15 aa, synthetic construct
GALWGAEEGKGDSQT

SEQ ID NO: 13207 - protein, 15 aa, synthetic construct
GAMLEVSDALGGPGR

SEQ ID NO: 13208 - protein, 12 aa, synthetic construct
GAPGGCRSRGDG

SEQ ID NO: 13209 - protein, 14 aa, synthetic construct
GAPSWTSRVSPPSP

SEQ ID NO: 13210 - protein, 15 aa, synthetic construct
GAQDQGGPGGGAAGP

SEQ ID NO: 13211 - protein, 15 aa, synthetic construct
GAQDRAPRRGLGMGG

SEQ ID NO: 13212 - protein, 15 aa, synthetic construct
GAQDTPTARWEMASA

SEQ ID NO: 13213 - protein, 15 aa, synthetic construct
GAQEKARAERREPAR

SEQ ID NO: 13214 - protein, 15 aa, synthetic construct
GAQERSGEAGGGSRQ

SEQ ID NO: 13215 - protein, 15 aa, synthetic construct
GAQGADGEGATRLPA

SEQ ID NO: 13216 - protein, 15 aa, synthetic construct
GAQGAQGGGGGWRRR

SEQ ID NO: 13217 - protein, 15 aa, synthetic construct
GAQGKDHLLPVLPPM

SEQ ID NO: 13218 - protein, 15 aa, synthetic construct
GAQGQQGPRGREEAP

SEQ ID NO: 13219 - protein, 15 aa, synthetic construct
GAQGTPGHGEREEDG

SEQ ID NO: 13220 - protein, 15 aa, synthetic construct
GAQLEIGAEQRGWER

SEQ ID NO: 13221 - protein, 15 aa, synthetic construct
GAQLSARALPSAPDP

SEQ ID NO: 13222 - protein, 15 aa, synthetic construct
GAQLSVALPRPTRDH

SEQ ID NO: 13223 - protein, 15 aa, synthetic construct
GAQQESLGGRRSDRQ

SEQ ID NO: 13224 - protein, 15 aa, synthetic construct
GAQQFPFRSVRLLLL

SEQ ID NO: 13225 - protein, 15 aa, synthetic construct
GAQRRGMAVGAERLG

SEQ ID NO: 13226 - protein, 15 aa, synthetic construct
GAQVLGDPPDSARVR

SEQ ID NO: 13227 - protein, 13 aa, synthetic construct
GARAAGSEGVCIA

SEQ ID NO: 13228 - protein, 15 aa, synthetic construct
GARAAPAAPAAAPAV

SEQ ID NO: 13229 - protein, 15 aa, synthetic construct
GARAARRAAERFGGA

SEQ ID NO: 13230 - protein, 15 aa, synthetic construct
GARADRAAAAGAAAA

SEQ ID NO: 13231 - protein, 15 aa, synthetic construct
GARAGGAGGPACAPC

SEQ ID NO: 13232 - protein, 15 aa, synthetic construct
GARAGRGGPGVRAAE

SEQ ID NO: 13233 - protein, 15 aa, synthetic construct
GARARRHPGCAGEPD

SEQ ID NO: 13234 - protein, 15 aa, synthetic construct
GARCPALAMATATGV

SEQ ID NO: 13235 - protein, 15 aa, synthetic construct
GARCRSPRRSPRGEP

SEQ ID NO: 13236 - protein, 13 aa, synthetic construct
GARDGAGDSGGAN

SEQ ID NO: 13237 - protein, 15 aa, synthetic construct
GAREHRGQLAAAESA

SEQ ID NO: 13238 - protein, 15 aa, synthetic construct
GAREHRSEHGATQGP

SEQ ID NO: 13239 - protein, 15 aa, synthetic construct
GARFLGGGADRRREA

SEQ ID NO: 13240 - protein, 15 aa, synthetic construct
GARGCHRDAASPGRV

SEQ ID NO: 13241 - protein, 15 aa, synthetic construct
GARGCQGGEPRGREA

SEQ ID NO: 13242 - protein, 15 aa, synthetic construct
GARGCWGPGPPSLGV

SEQ ID NO: 13243 - protein, 15 aa, synthetic construct
GARGERGDRTLAAEF

SEQ ID NO: 13244 - protein, 15 aa, synthetic construct
GARGERGDRTLAAGF

SEQ ID NO: 13245 - protein, 15 aa, synthetic construct
GARGERGERTLAAEF

SEQ ID NO: 13246 - protein, 15 aa, synthetic construct
GARGGARAEAAGRLH

SEQ ID NO: 13247 - protein, 15 aa, synthetic construct
GARGPFCPGGVATAA

SEQ ID NO: 13248 - protein, 15 aa, synthetic construct
GARGPGFPQEAPRNA

SEQ ID NO: 13249 - protein, 15 aa, synthetic construct
GARGPRSAAAAAAAA

SEQ ID NO: 13250 - protein, 15 aa, synthetic construct
GARGSAMAGRAGGGG

SEQ ID NO: 13251 - protein, 15 aa, synthetic construct
GARHQEGRTDSPQAP

SEQ ID NO: 13252 - protein, 15 aa, synthetic construct
GARHQPGAAGTGAAA

SEQ ID NO: 13253 - protein, 15 aa, synthetic construct
GARIREELSSRGALR

SEQ ID NO: 13254 - protein, 15 aa, synthetic construct
GARLHGRGGRRGAAP

SEQ ID NO: 13255 - protein, 15 aa, synthetic construct
GARLRQEAGVRGGQP

SEQ ID NO: 13256 - protein, 15 aa, synthetic construct
GARPERGRGHQRRHL

SEQ ID NO: 13257 - protein, 15 aa, synthetic construct
GARPGDVRPALNPDR

SEQ ID NO: 13258 - protein, 15 aa, synthetic construct
GARPRLAAAWLPGPG

SEQ ID NO: 13259 - protein, 15 aa, synthetic construct
GARQAPAQPPPSGAR

SEQ ID NO: 13260 - protein, 15 aa, synthetic construct
GARQQPPKDPVHGPA

SEQ ID NO: 13261 - protein, 15 aa, synthetic construct
GARRAVAPGPASAAA

SEQ ID NO: 13262 - protein, 12 aa, synthetic construct
GARRGEPTGPER

SEQ ID NO: 13263 - protein, 15 aa, synthetic construct
GARRGPPEPEQRRQG

SEQ ID NO: 13264 - protein, 15 aa, synthetic construct
GARRGPSASAEDRRA

SEQ ID NO: 13265 - protein, 15 aa, synthetic construct
GARRGRGAPAGLLSP

SEQ ID NO: 13266 - protein, 15 aa, synthetic construct
GARRLRGGREPRRRG

SEQ ID NO: 13267 - protein, 15 aa, synthetic construct
GARRPRRRRTGAGCR

SEQ ID NO: 13268 - protein, 15 aa, synthetic construct
GARRRLGRAGRRTGA

SEQ ID NO: 13269 - protein, 15 aa, synthetic construct
GARRVGSGKRAAGAR

SEQ ID NO: 13270 - protein, 15 aa, synthetic construct
GARSGGRSPEGAGAR

SEQ ID NO: 13271 - protein, 15 aa, synthetic construct
GARSGPRADAVLEVA

SEQ ID NO: 13272 - protein, 15 aa, synthetic construct
GARSGRRRSRSRPEQ

SEQ ID NO: 13273 - protein, 15 aa, synthetic construct
GARSQAAAAAPHFLP

SEQ ID NO: 13274 - protein, 15 aa, synthetic construct
GARSTGAPGRDSGHL

SEQ ID NO: 13275 - protein, 15 aa, synthetic construct
GARTGARAGAQAGPG

SEQ ID NO: 13276 - protein, 15 aa, synthetic construct
GARTRGRRAAGGLLG

SEQ ID NO: 13277 - protein, 15 aa, synthetic construct
GARWPRPPPGVSPGA

SEQ ID NO: 13278 - protein, 15 aa, synthetic construct
GASAAPASRPLPTGL

SEQ ID NO: 13279 - protein, 15 aa, synthetic construct
GASAEASAAQRAGPA

SEQ ID NO: 13280 - protein, 15 aa, synthetic construct
GASGDPEEIHPEGPG

SEQ ID NO: 13281 - protein, 12 aa, synthetic construct
GASLRAGAGAAL

SEQ ID NO: 13282 - protein, 15 aa, synthetic construct
GASPQESGPRSWMYR

SEQ ID NO: 13283 - protein, 15 aa, synthetic construct
GASPQSPMLGPGLCL

SEQ ID NO: 13284 - protein, 15 aa, synthetic construct
GASPSRTTAIASPSP

SEQ ID NO: 13285 - protein, 15 aa, synthetic construct
GASRALATHAPDPLT

SEQ ID NO: 13286 - protein, 15 aa, synthetic construct
GASRGGNPQGGWDLG

SEQ ID NO: 13287 - protein, 15 aa, synthetic construct
GASRGRGPGPGAAAT

SEQ ID NO: 13288 - protein, 13 aa, synthetic construct
GASRNPEREGDLR

SEQ ID NO: 13289 - protein, 15 aa, synthetic construct
GASRPSRASLSFPAL

SEQ ID NO: 13290 - protein, 15 aa, synthetic construct
GASSAFAPTASPGSP

SEQ ID NO: 13291 - protein, 15 aa, synthetic construct
GASSRGAEPDAGGGA

SEQ ID NO: 13292 - protein, 15 aa, synthetic construct
GASWGSRPRATQGEA

SEQ ID NO: 13293 - protein, 15 aa, synthetic construct
GATDGAVRRGARARS

SEQ ID NO: 13294 - protein, 15 aa, synthetic construct
GATDNPPTAWGPWSH

SEQ ID NO: 13295 - protein, 15 aa, synthetic construct
GATFGSAPCAGTRKG

SEQ ID NO: 13296 - protein, 15 aa, synthetic construct
GATFSWLCEAGLGFR

SEQ ID NO: 13297 - protein, 15 aa, synthetic construct
GATLGAASPRAADAP

SEQ ID NO: 13298 - protein, 15 aa, synthetic construct
GATQYPGAQGPVGDQ

SEQ ID NO: 13299 - protein, 15 aa, synthetic construct
GATRKAGAGTTPPSY

SEQ ID NO: 13300 - protein, 15 aa, synthetic construct
GATSAAEGGARSCGG

SEQ ID NO: 13301 - protein, 15 aa, synthetic construct
GAVARLRVRGLPGAG

SEQ ID NO: 13302 - protein, 15 aa, synthetic construct
GAVAVEGAGGHRSLC

SEQ ID NO: 13303 - protein, 15 aa, synthetic construct
GAVCSGRAGLRGRIH

SEQ ID NO: 13304 - protein, 15 aa, synthetic construct
GAVDHSLPEEADKAE

SEQ ID NO: 13305 - protein, 15 aa, synthetic construct
GAVEAVRAVAHPLQG

SEQ ID NO: 13306 - protein, 15 aa, synthetic construct
GAVGAALGAAAPGSY

SEQ ID NO: 13307 - protein, 15 aa, synthetic construct
GAVGGRGPSQSQAQG

SEQ ID NO: 13308 - protein, 15 aa, synthetic construct
GAVGVPAAVQQLDTL

SEQ ID NO: 13309 - protein, 15 aa, synthetic construct
GAVLRRAVPGPRCGS

SEQ ID NO: 13310 - protein, 15 aa, synthetic construct
GAVPHAGGGAAPGRE

SEQ ID NO: 13311 - protein, 15 aa, synthetic construct
GAVPRGPPGAGHRGR

SEQ ID NO: 13312 - protein, 15 aa, synthetic construct
GAVQQSHPPEEPPTA

SEQ ID NO: 13313 - protein, 15 aa, synthetic construct
GAVRAGAAPAAHAAG

SEQ ID NO: 13314 - protein, 15 aa, synthetic construct
GAVRAVGRAAWRLRG

SEQ ID NO: 13315 - protein, 15 aa, synthetic construct
GAVRGGPGAGARPVE

SEQ ID NO: 13316 - protein, 15 aa, synthetic construct
GAVRGRGLRECPALA

SEQ ID NO: 13317 - protein, 15 aa, synthetic construct
GAVRRESQSPAGEVR

SEQ ID NO: 13318 - protein, 15 aa, synthetic construct
GAVSCRQDQRQGRLG

SEQ ID NO: 13319 - protein, 15 aa, synthetic construct
GAVSHRRAGVRRGEH

SEQ ID NO: 13320 - protein, 15 aa, synthetic construct
GAVVGAESQAPGAPR

SEQ ID NO: 13321 - protein, 15 aa, synthetic construct
GAVVGHSAASSQKDG

SEQ ID NO: 13322 - protein, 14 aa, synthetic construct
GAVWKDPGEAAQRT

SEQ ID NO: 13323 - protein, 15 aa, synthetic construct
GAWGSLGHELGPEAG

SEQ ID NO: 13324 - protein, 15 aa, synthetic construct
GCAARRVSAPPARPA

SEQ ID NO: 13325 - protein, 15 aa, synthetic construct
GCADTEGCPGAAEAC

SEQ ID NO: 13326 - protein, 15 aa, synthetic construct
GCAEGGAGCRLEPSG

SEQ ID NO: 13327 - protein, 15 aa, synthetic construct
GCAGLREAEVGAARG

SEQ ID NO: 13328 - protein, 15 aa, synthetic construct
GCAGQQPSDHRAGAQ

SEQ ID NO: 13329 - protein, 15 aa, synthetic construct
GCAPFGPSAARVLSP

SEQ ID NO: 13330 - protein, 13 aa, synthetic construct
GCAREDDVSRETK

SEQ ID NO: 13331 - protein, 15 aa, synthetic construct
GCARPALQRPPSERR

SEQ ID NO: 13332 - protein, 15 aa, synthetic construct
GCARPGVSAGGGGGG

SEQ ID NO: 13333 - protein, 15 aa, synthetic construct
GCCAGLPAPGAGKSS

SEQ ID NO: 13334 - protein, 15 aa, synthetic construct
GCCCAAADAPRAPSC

SEQ ID NO: 13335 - protein, 15 aa, synthetic construct
GCCHGAGAQRELGAR

SEQ ID NO: 13336 - protein, 15 aa, synthetic construct
GCDACRAPRPRDLHL

SEQ ID NO: 13337 - protein, 15 aa, synthetic construct
GCDHPAPLVQAHPGA

SEQ ID NO: 13338 - protein, 15 aa, synthetic construct
GCEAGGDGGHSRAQE

SEQ ID NO: 13339 - protein, 15 aa, synthetic construct
GCEVLPRGGRGPCQP

SEQ ID NO: 13340 - protein, 14 aa, synthetic construct
GCFPLTPSDANVKA

SEQ ID NO: 13341 - protein, 15 aa, synthetic construct
GCFQDPGGCRPNAGR

SEQ ID NO: 13342 - protein, 15 aa, synthetic construct
GCFTDVEVEAQQGWR

SEQ ID NO: 13343 - protein, 15 aa, synthetic construct
GCGAGDGPATQAPRL

SEQ ID NO: 13344 - protein, 15 aa, synthetic construct
GCGAGRGGGAHPLSV

SEQ ID NO: 13345 - protein, 15 aa, synthetic construct
GCGAHRAGRGAGPGG

SEQ ID NO: 13346 - protein, 15 aa, synthetic construct
GCGDSQLLDPAEAAG

SEQ ID NO: 13347 - protein, 15 aa, synthetic construct
GCGGADATAAAAAAA

SEQ ID NO: 13348 - protein, 13 aa, synthetic construct
GCGQQRGPDGEPA

SEQ ID NO: 13349 - protein, 15 aa, synthetic construct
GCGRRRRGGVGSGEH

SEQ ID NO: 13350 - protein, 15 aa, synthetic construct
GCGRRRRRRGGGGGP

SEQ ID NO: 13351 - protein, 15 aa, synthetic construct
GCGSGWLGAGSAALR

SEQ ID NO: 13352 - protein, 15 aa, synthetic construct
GCHPLTPGHPAGLPL

SEQ ID NO: 13353 - protein, 15 aa, synthetic construct
GCHVCHRPSGQHRSS

SEQ ID NO: 13354 - protein, 15 aa, synthetic construct
GCKLDTLMGSGRTLQ

SEQ ID NO: 13355 - protein, 15 aa, synthetic construct
GCLGRIGPGDVSALP

SEQ ID NO: 13356 - protein, 15 aa, synthetic construct
GCLSTSPDSCPGTAC

SEQ ID NO: 13357 - protein, 15 aa, synthetic construct
GCPDSGAFCSTPEPA

SEQ ID NO: 13358 - protein, 15 aa, synthetic construct
GCPDVAPCLAALSQG

SEQ ID NO: 13359 - protein, 15 aa, synthetic construct
GCPESNDFGNLSSAF

SEQ ID NO: 13360 - protein, 15 aa, synthetic construct
GCPLPPPEAGSCVPD

SEQ ID NO: 13361 - protein, 15 aa, synthetic construct
GCPRETGGASGPGGS

SEQ ID NO: 13362 - protein, 15 aa, synthetic construct
GCPSLPAGPTQSPGS

SEQ ID NO: 13363 - protein, 15 aa, synthetic construct
GCPVLQDRSEGRSRR

SEQ ID NO: 13364 - protein, 15 aa, synthetic construct
GCPVYARQFGRAVDP

SEQ ID NO: 13365 - protein, 15 aa, synthetic construct
GCPWCHRSSWREFAL

SEQ ID NO: 13366 - protein, 15 aa, synthetic construct
GCQGVTDRIPQLRGG

SEQ ID NO: 13367 - protein, 15 aa, synthetic construct
GCRAAATGPPELSTP

SEQ ID NO: 13368 - protein, 15 aa, synthetic construct
GCRCHDTQPCADPSG

SEQ ID NO: 13369 - protein, 15 aa, synthetic construct
GCRRRCCRCRGTPVP

SEQ ID NO: 13370 - protein, 15 aa, synthetic construct
GCRSAPERGRGQENH

SEQ ID NO: 13371 - protein, 15 aa, synthetic construct
GCSAGSQGGRGVGGR

SEQ ID NO: 13372 - protein, 15 aa, synthetic construct
GCSCPKSTRLPTCAP

SEQ ID NO: 13373 - protein, 15 aa, synthetic construct
GCSPYAENLEQECGE

SEQ ID NO: 13374 - protein, 15 aa, synthetic construct
GCSQSSALRIQSGKP

SEQ ID NO: 13375 - protein, 15 aa, synthetic construct
GCTGVEVPADPAAHG

SEQ ID NO: 13376 - protein, 15 aa, synthetic construct
GCVPQPDASPFPVTS

SEQ ID NO: 13377 - protein, 15 aa, synthetic construct
GCVSAAATAAALEGP

SEQ ID NO: 13378 - protein, 15 aa, synthetic construct
GCWCPRRRPPRCCLP

SEQ ID NO: 13379 - protein, 15 aa, synthetic construct
GCWERRGAGPGGPQR

SEQ ID NO: 13380 - protein, 15 aa, synthetic construct
GDAAMASCLLHSGSP

SEQ ID NO: 13381 - protein, 15 aa, synthetic construct
GDAARLAAAARPRGA

SEQ ID NO: 13382 - protein, 15 aa, synthetic construct
GDADAGVPGRPAHAA

SEQ ID NO: 13383 - protein, 15 aa, synthetic construct
GDADRGRGPHPPPHA

SEQ ID NO: 13384 - protein, 15 aa, synthetic construct
GDAGGGAGPLLPCPD

SEQ ID NO: 13385 - protein, 15 aa, synthetic construct
GDAGGQAAPAHPQQP

SEQ ID NO: 13386 - protein, 15 aa, synthetic construct
GDAGGSGALGSGRAA

SEQ ID NO: 13387 - protein, 15 aa, synthetic construct
GDAGKRTPTFRPGPF

SEQ ID NO: 13388 - protein, 15 aa, synthetic construct
GDAGQLGRGGPAGGP

SEQ ID NO: 13389 - protein, 15 aa, synthetic construct
GDAGRGGSAGKRRRR

SEQ ID NO: 13390 - protein, 15 aa, synthetic construct
GDAGSGTAAGSPTQE

SEQ ID NO: 13391 - protein, 15 aa, synthetic construct
GDAGTSGGPGSSPPL

SEQ ID NO: 13392 - protein, 15 aa, synthetic construct
GDALLSGEGSEAERA

SEQ ID NO: 13393 - protein, 14 aa, synthetic construct
GDALSDREFRRPSA

SEQ ID NO: 13394 - protein, 15 aa, synthetic construct
GDAPLPPASRHGPGA

SEQ ID NO: 13395 - protein, 15 aa, synthetic construct
GDAPRAGLEPLVPRH

SEQ ID NO: 13396 - protein, 15 aa, synthetic construct
GDCASKNATEKASYV

SEQ ID NO: 13397 - protein, 15 aa, synthetic construct
GDCCGDGGLSADGCE

SEQ ID NO: 13398 - protein, 15 aa, synthetic construct
GDCDPRAAADGQPRW

SEQ ID NO: 13399 - protein, 15 aa, synthetic construct
GDCHGAGHPAAAGPG

SEQ ID NO: 13400 - protein, 15 aa, synthetic construct
GDCPIQVTLPEGKPG

SEQ ID NO: 13401 - protein, 15 aa, synthetic construct
GDCSCGSGGGGGGGG

SEQ ID NO: 13402 - protein, 15 aa, synthetic construct
GDDASSPASSRAAGG

SEQ ID NO: 13403 - protein, 15 aa, synthetic construct
GDDGGAAGDGLQCAQ

SEQ ID NO: 13404 - protein, 15 aa, synthetic construct
GDDTVGRLVPGDGCE

SEQ ID NO: 13405 - protein, 15 aa, synthetic construct
GDEDGDGDSFGPRAK

SEQ ID NO: 13406 - protein, 15 aa, synthetic construct
GDEGRVRAEGRRPSA

SEQ ID NO: 13407 - protein, 13 aa, synthetic construct
GDELWGPCQRVPP

SEQ ID NO: 13408 - protein, 15 aa, synthetic construct
GDEPEPRRRRGCQRA

SEQ ID NO: 13409 - protein, 15 aa, synthetic construct
GDERRRRGGGSGSGA

SEQ ID NO: 13410 - protein, 15 aa, synthetic construct
GDFEQSAEIQREDRA

SEQ ID NO: 13411 - protein, 15 aa, synthetic construct
GDFWRGLGGAGDRLV

SEQ ID NO: 13412 - protein, 15 aa, synthetic construct
GDGADGCGSAGSCCS

SEQ ID NO: 13413 - protein, 13 aa, synthetic construct
GDGDEASSGSQAS

SEQ ID NO: 13414 - protein, 15 aa, synthetic construct
GDGGEEGPGPGRRGQ

SEQ ID NO: 13415 - protein, 15 aa, synthetic construct
GDGGEGVRRPGRALP

SEQ ID NO: 13416 - protein, 15 aa, synthetic construct
GDGGGSGGGDGSSGL

SEQ ID NO: 13417 - protein, 15 aa, synthetic construct
GDGGQPEGQVGAGLL

SEQ ID NO: 13418 - protein, 12 aa, synthetic construct
GDGGRREGDERD

SEQ ID NO: 13419 - protein, 15 aa, synthetic construct
GDGHGAPGGPAAPSW

SEQ ID NO: 13420 - protein, 15 aa, synthetic construct
GDGKGVRADRQVREL

SEQ ID NO: 13421 - protein, 15 aa, synthetic construct
GDGQMDSFRAAEQDA

SEQ ID NO: 13422 - protein, 15 aa, synthetic construct
GDGQTDSFRAAEQDA

SEQ ID NO: 13423 - protein, 15 aa, synthetic construct
GDGQTDSFRAAEQGA

SEQ ID NO: 13424 - protein, 15 aa, synthetic construct
GDGRGATPASEAAPH

SEQ ID NO: 13425 - protein, 15 aa, synthetic construct
GDGRRPRSPARGPPA

SEQ ID NO: 13426 - protein, 15 aa, synthetic construct
GDGSSKRAVRAAGES

SEQ ID NO: 13427 - protein, 15 aa, synthetic construct
GDGVPAGFGAGLAGQ

SEQ ID NO: 13428 - protein, 15 aa, synthetic construct
GDHEDPKGWPLPGAV

SEQ ID NO: 13429 - protein, 15 aa, synthetic construct
GDHGHDGDLGLGAKA

SEQ ID NO: 13430 - protein, 15 aa, synthetic construct
GDHPRADRQAGPLRE

SEQ ID NO: 13431 - protein, 15 aa, synthetic construct
GDIESRAGYELLGGE

SEQ ID NO: 13432 - protein, 15 aa, synthetic construct
GDIHLGAAEKDLRGG

SEQ ID NO: 13433 - protein, 13 aa, synthetic construct
GDILGRAAPNTRR

SEQ ID NO: 13434 - protein, 14 aa, synthetic construct
GDKEQPHAPGHGSG

SEQ ID NO: 13435 - protein, 15 aa, synthetic construct
GDKGASREETVVPLH

SEQ ID NO: 13436 - protein, 15 aa, synthetic construct
GDLAERLLPQRLLLQ

SEQ ID NO: 13437 - protein, 15 aa, synthetic construct
GDLLCGRELLQPAGK

SEQ ID NO: 13438 - protein, 15 aa, synthetic construct
GDLLGAGPGEQDGHC

SEQ ID NO: 13439 - protein, 15 aa, synthetic construct
GDLREGSPEDQSCLS

SEQ ID NO: 13440 - protein, 14 aa, synthetic construct
GDLRRNPAERVPRN

SEQ ID NO: 13441 - protein, 15 aa, synthetic construct
GDLSGFQHLQQAELG

SEQ ID NO: 13442 - protein, 15 aa, synthetic construct
GDLSTQAAGAARGDQ

SEQ ID NO: 13443 - protein, 15 aa, synthetic construct
GDLTGPATPGAPNSG

SEQ ID NO: 13444 - protein, 15 aa, synthetic construct
GDLVRCGPLRCCPGR

SEQ ID NO: 13445 - protein, 15 aa, synthetic construct
GDPAVGPSPQRLAAA

SEQ ID NO: 13446 - protein, 15 aa, synthetic construct
GDPCACAAVLAAPRL

SEQ ID NO: 13447 - protein, 15 aa, synthetic construct
GDPCLAPGPAPRDRR

SEQ ID NO: 13448 - protein, 15 aa, synthetic construct
GDPGGPSGAGVSAPL

SEQ ID NO: 13449 - protein, 15 aa, synthetic construct
GDPGNGGGHDPGLGG

SEQ ID NO: 13450 - protein, 15 aa, synthetic construct
GDPGPEVAERSAAEP

SEQ ID NO: 13451 - protein, 15 aa, synthetic construct
GDPGPGAVPGGLGGS

SEQ ID NO: 13452 - protein, 15 aa, synthetic construct
GDPHLMPVPGAAGHD

SEQ ID NO: 13453 - protein, 15 aa, synthetic construct
GDPLPRAAARGDHRC

SEQ ID NO: 13454 - protein, 15 aa, synthetic construct
GDPLSHQPLEPRRPS

SEQ ID NO: 13455 - protein, 15 aa, synthetic construct
GDPPGVQEPSGSAAA

SEQ ID NO: 13456 - protein, 15 aa, synthetic construct
GDPQLRLHPTAGHSP

SEQ ID NO: 13457 - protein, 14 aa, synthetic construct
GDPREPVQESQTEQ

SEQ ID NO: 13458 - protein, 15 aa, synthetic construct
GDPRGLRRARTRAAR

SEQ ID NO: 13459 - protein, 15 aa, synthetic construct
GDPVGRPSSAWLLAQ

SEQ ID NO: 13460 - protein, 15 aa, synthetic construct
GDPVPCAPPGSAGVP

SEQ ID NO: 13461 - protein, 15 aa, synthetic construct
GDPVPGPTLPGAGQE

SEQ ID NO: 13462 - protein, 15 aa, synthetic construct
GDQAPWGRGDAGGPQ

SEQ ID NO: 13463 - protein, 15 aa, synthetic construct
GDQDGGRGAVGGSEE

SEQ ID NO: 13464 - protein, 15 aa, synthetic construct
GDQELQNAEVFSVPD

SEQ ID NO: 13465 - protein, 15 aa, synthetic construct
GDQRGTRSAKKASSN

SEQ ID NO: 13466 - protein, 15 aa, synthetic construct
GDQTGGDSRQRPGRS

SEQ ID NO: 13467 - protein, 15 aa, synthetic construct
GDQTNSSDELHSGCS

SEQ ID NO: 13468 - protein, 15 aa, synthetic construct
GDQTPFRGYPDVGRL

SEQ ID NO: 13469 - protein, 15 aa, synthetic construct
GDRAEAFPPGGVRRV

SEQ ID NO: 13470 - protein, 15 aa, synthetic construct
GDRALCPTSEVLEEA

SEQ ID NO: 13471 - protein, 15 aa, synthetic construct
GDRGDYPIGSHGHSS

SEQ ID NO: 13472 - protein, 15 aa, synthetic construct
GDRGGRGQRLPTAAR

SEQ ID NO: 13473 - protein, 15 aa, synthetic construct
GDRHGAVGSGGDGTG

SEQ ID NO: 13474 - protein, 15 aa, synthetic construct
GDRPGAPGERRCHDR

SEQ ID NO: 13475 - protein, 15 aa, synthetic construct
GDRPGGALQRRHEPQ

SEQ ID NO: 13476 - protein, 15 aa, synthetic construct
GDRSRLLPEHQQARR

SEQ ID NO: 13477 - protein, 15 aa, synthetic construct
GDRTRCLRTPSSLQA

SEQ ID NO: 13478 - protein, 15 aa, synthetic construct
GDSEQEDVNSKPPAF

SEQ ID NO: 13479 - protein, 13 aa, synthetic construct
GDSHASANSPETS

SEQ ID NO: 13480 - protein, 15 aa, synthetic construct
GDSPQAGQGCPAQER

SEQ ID NO: 13481 - protein, 15 aa, synthetic construct
GDSQEKHQEPPSAEP

SEQ ID NO: 13482 - protein, 15 aa, synthetic construct
GDSQGPAPAASPAAV

SEQ ID NO: 13483 - protein, 12 aa, synthetic construct
GDSRPCDSGGPL

SEQ ID NO: 13484 - protein, 15 aa, synthetic construct
GDSRVSQRRTQGQEH

SEQ ID NO: 13485 - protein, 15 aa, synthetic construct
GDSSAGTPKLAVGLA

SEQ ID NO: 13486 - protein, 15 aa, synthetic construct
GDSSQEDQALPSAAD

SEQ ID NO: 13487 - protein, 15 aa, synthetic construct
GDTEQQEGVATPVPI

SEQ ID NO: 13488 - protein, 15 aa, synthetic construct
GDTQLRLPAAGGSVL

SEQ ID NO: 13489 - protein, 15 aa, synthetic construct
GDVGGERAWFGHGLG

SEQ ID NO: 13490 - protein, 15 aa, synthetic construct
GDVGIAGRFVGDAGR

SEQ ID NO: 13491 - protein, 15 aa, synthetic construct
GDVMGATEPGGDTSS

SEQ ID NO: 13492 - protein, 15 aa, synthetic construct
GDVRGAPMSGITARG

SEQ ID NO: 13493 - protein, 15 aa, synthetic construct
GDVRLAGAALLQLVR

SEQ ID NO: 13494 - protein, 15 aa, synthetic construct
GDWMDAQSETKASPC

SEQ ID NO: 13495 - protein, 15 aa, synthetic construct
GDWSAAAPATSPVAA

SEQ ID NO: 13496 - protein, 15 aa, synthetic construct
GDYRTKRPGIPASAA

SEQ ID NO: 13497 - protein, 15 aa, synthetic construct
GEAAAAGGPRGWGPG

SEQ ID NO: 13498 - protein, 15 aa, synthetic construct
GEAAAEAAGRRRSSP

SEQ ID NO: 13499 - protein, 15 aa, synthetic construct
GEAADGQREAEADQR

SEQ ID NO: 13500 - protein, 15 aa, synthetic construct
GEAAELRPRPPALQN

SEQ ID NO: 13501 - protein, 15 aa, synthetic construct
GEAAEPAGSAPGPWA

SEQ ID NO: 13502 - protein, 15 aa, synthetic construct
GEAAGLPAPPDAHAP

SEQ ID NO: 13503 - protein, 12 aa, synthetic construct
GEAAGLSGRRGT

SEQ ID NO: 13504 - protein, 15 aa, synthetic construct
GEAAPALQHQGAPAG

SEQ ID NO: 13505 - protein, 15 aa, synthetic construct
GEADCAHPLGDGTGT

SEQ ID NO: 13506 - protein, 15 aa, synthetic construct
GEADYPDIREGEAPC

SEQ ID NO: 13507 - protein, 15 aa, synthetic construct
GEAEQRGQAETTAAL

SEQ ID NO: 13508 - protein, 15 aa, synthetic construct
GEAGAAAVAPEAAAA

SEQ ID NO: 13509 - protein, 15 aa, synthetic construct
GEAGGGAGGGRRRRR

SEQ ID NO: 13510 - protein, 15 aa, synthetic construct
GEAGGGGGDSQMGST

SEQ ID NO: 13511 - protein, 15 aa, synthetic construct
GEAGGRAGRPALEHG

SEQ ID NO: 13512 - protein, 15 aa, synthetic construct
GEAGPGAEAPVLVRG

SEQ ID NO: 13513 - protein, 15 aa, synthetic construct
GEAGQRPEPSRPGEE

SEQ ID NO: 13514 - protein, 15 aa, synthetic construct
GEALLPAARAGGRLS

SEQ ID NO: 13515 - protein, 14 aa, synthetic construct
GEALYCPDPTVPVP

SEQ ID NO: 13516 - protein, 15 aa, synthetic construct
GEAPDGPGEAAADQH

SEQ ID NO: 13517 - protein, 15 aa, synthetic construct
GEAPGPHRPLSAALG

SEQ ID NO: 13518 - protein, 15 aa, synthetic construct
GEAQVQRTEHHQPVQ

SEQ ID NO: 13519 - protein, 15 aa, synthetic construct
GEARAAQPRPRRPDP

SEQ ID NO: 13520 - protein, 15 aa, synthetic construct
GEARARVAAASAARA

SEQ ID NO: 13521 - protein, 15 aa, synthetic construct
GEARGAGPAGGRPVL

SEQ ID NO: 13522 - protein, 15 aa, synthetic construct
GEARGRGAGGRAGRP

SEQ ID NO: 13523 - protein, 15 aa, synthetic construct
GEATGARCGRRVAGG

SEQ ID NO: 13524 - protein, 15 aa, synthetic construct
GEAVRCAVPAAADRG

SEQ ID NO: 13525 - protein, 15 aa, synthetic construct
GECAIRGEALPQLPA

SEQ ID NO: 13526 - protein, 15 aa, synthetic construct
GECGQGVEAVAPAGA

SEQ ID NO: 13527 - protein, 15 aa, synthetic construct
GECGRLQAGYGAPQR

SEQ ID NO: 13528 - protein, 15 aa, synthetic construct
GECSAAERIPVCGGS

SEQ ID NO: 13529 - protein, 12 aa, synthetic construct
GEDGGTVAEDER

SEQ ID NO: 13530 - protein, 13 aa, synthetic construct
GEDGPESAAPPQN

SEQ ID NO: 13531 - protein, 15 aa, synthetic construct
GEDGSGRGLCGDSGD

SEQ ID NO: 13532 - protein, 15 aa, synthetic construct
GEDLRLPVQAAADRG

SEQ ID NO: 13533 - protein, 15 aa, synthetic construct
GEDPDPPACRPLCGL

SEQ ID NO: 13534 - protein, 15 aa, synthetic construct
GEDQRAGEAAVREGG

SEQ ID NO: 13535 - protein, 15 aa, synthetic construct
GEDVAAAAVYGAALP

SEQ ID NO: 13536 - protein, 15 aa, synthetic construct
GEDVPCDHSPGWQRA

SEQ ID NO: 13537 - protein, 15 aa, synthetic construct
GEDVRLSLQAPADRR

SEQ ID NO: 13538 - protein, 15 aa, synthetic construct
GEEAEGGLRGAGPRR

SEQ ID NO: 13539 - protein, 15 aa, synthetic construct
GEEALRAAACRCLPH

SEQ ID NO: 13540 - protein, 15 aa, synthetic construct
GEEDVRPAFQAAPDR

SEQ ID NO: 13541 - protein, 15 aa, synthetic construct
GEEEELRGPGAGRRP

SEQ ID NO: 13542 - protein, 15 aa, synthetic construct
GEEERLGWSWQFPTP

SEQ ID NO: 13543 - protein, 15 aa, synthetic construct
GEEGAELLQGVPRAR

SEQ ID NO: 13544 - protein, 15 aa, synthetic construct
GEEHYHGSDGPAEGR

SEQ ID NO: 13545 - protein, 15 aa, synthetic construct
GEEKAPGWHGAPAPP

SEQ ID NO: 13546 - protein, 15 aa, synthetic construct
GEELELRESWLPAGG

SEQ ID NO: 13547 - protein, 15 aa, synthetic construct
GEEPRDAPDSHLLLL

SEQ ID NO: 13548 - protein, 15 aa, synthetic construct
GEEPSKRWPPPVPRA

SEQ ID NO: 13549 - protein, 15 aa, synthetic construct
GEEQRREWAARARGR

SEQ ID NO: 13550 - protein, 15 aa, synthetic construct
GEEQTPSSKSGSSPL

SEQ ID NO: 13551 - protein, 15 aa, synthetic construct
GEERAPLLALVRAAP

SEQ ID NO: 13552 - protein, 15 aa, synthetic construct
GEESLSGGLAKETLL

SEQ ID NO: 13553 - protein, 14 aa, synthetic construct
GEGAVPGDGCGQEN

SEQ ID NO: 13554 - protein, 15 aa, synthetic construct
GEGDVQLRSGPEGGQ

SEQ ID NO: 13555 - protein, 15 aa, synthetic construct
GEGEAADERVHGVEL

SEQ ID NO: 13556 - protein, 15 aa, synthetic construct
GEGEEGRGAKEGLRG

SEQ ID NO: 13557 - protein, 15 aa, synthetic construct
GEGEGPRLQARPEQP

SEQ ID NO: 13558 - protein, 15 aa, synthetic construct
GEGERDAGPQQPHPR

SEQ ID NO: 13559 - protein, 15 aa, synthetic construct
GEGGAGPEPRAAARA

SEQ ID NO: 13560 - protein, 15 aa, synthetic construct
GEGGGGGGLWGRSGR

SEQ ID NO: 13561 - protein, 15 aa, synthetic construct
GEGGGRVPGTEGFPG

SEQ ID NO: 13562 - protein, 15 aa, synthetic construct
GEGGVQGAAGRAQQD

SEQ ID NO: 13563 - protein, 15 aa, synthetic construct
GEGPCAGTGGEAAGR

SEQ ID NO: 13564 - protein, 15 aa, synthetic construct
GEGQEVVPAEPGVPA

SEQ ID NO: 13565 - protein, 15 aa, synthetic construct
GEGREPGRGGRRARG

SEQ ID NO: 13566 - protein, 15 aa, synthetic construct
GEGSRRNRDFGACAG

SEQ ID NO: 13567 - protein, 15 aa, synthetic construct
GEHADLLRVPQCQPQ

SEQ ID NO: 13568 - protein, 15 aa, synthetic construct
GEHPEELSPPSRVQV

SEQ ID NO: 13569 - protein, 15 aa, synthetic construct
GEIDQDGAAREVVTP

SEQ ID NO: 13570 - protein, 15 aa, synthetic construct
GEIQQQVEARSCGGA

SEQ ID NO: 13571 - protein, 14 aa, synthetic construct
GEITLQTSSPGRGP

SEQ ID NO: 13572 - protein, 15 aa, synthetic construct
GEKGLGGRGQGEPEP

SEQ ID NO: 13573 - protein, 15 aa, synthetic construct
GEKTEAVSPALLPVA

SEQ ID NO: 13574 - protein, 15 aa, synthetic construct
GELAAVRGDGLGLRL

SEQ ID NO: 13575 - protein, 15 aa, synthetic construct
GELGSVPGGRRRGCQ

SEQ ID NO: 13576 - protein, 15 aa, synthetic construct
GELPATTGPRATGPG

SEQ ID NO: 13577 - protein, 15 aa, synthetic construct
GELPREAAAPPGRRP

SEQ ID NO: 13578 - protein, 15 aa, synthetic construct
GELQSRAASAARGRQ

SEQ ID NO: 13579 - protein, 15 aa, synthetic construct
GELQTGSPAPASPPH

SEQ ID NO: 13580 - protein, 15 aa, synthetic construct
GELRAAAAALGLHGG

SEQ ID NO: 13581 - protein, 15 aa, synthetic construct
GELRHAGGVRPDLRA

SEQ ID NO: 13582 - protein, 15 aa, synthetic construct
GEMGEGVARIGGARR

SEQ ID NO: 13583 - protein, 14 aa, synthetic construct
GENLGRKRNEELNQ

SEQ ID NO: 13584 - protein, 15 aa, synthetic construct
GENVPTAPPESHLYP

SEQ ID NO: 13585 - protein, 15 aa, synthetic construct
GEPAAARAARAGERR

SEQ ID NO: 13586 - protein, 15 aa, synthetic construct
GEPAAGDRRPLPEWG

SEQ ID NO: 13587 - protein, 15 aa, synthetic construct
GEPAALRGGDHRARA

SEQ ID NO: 13588 - protein, 15 aa, synthetic construct
GEPAGESGARRALPQ

SEQ ID NO: 13589 - protein, 15 aa, synthetic construct
GEPASGARLLGSEPD

SEQ ID NO: 13590 - protein, 15 aa, synthetic construct
GEPDARVPSPRRAAA

SEQ ID NO: 13591 - protein, 15 aa, synthetic construct
GEPEAAGNGAKRGGG

SEQ ID NO: 13592 - protein, 15 aa, synthetic construct
GEPGASGARRGGMPG

SEQ ID NO: 13593 - protein, 15 aa, synthetic construct
GEPGDGGADPAGEPS

SEQ ID NO: 13594 - protein, 15 aa, synthetic construct
GEPGGGESQALPAVS

SEQ ID NO: 13595 - protein, 15 aa, synthetic construct
GEPGGHGVAPASAEE

SEQ ID NO: 13596 - protein, 15 aa, synthetic construct
GEPGSRPADVAWRSD

SEQ ID NO: 13597 - protein, 12 aa, synthetic construct
GEPGWEAEEERR

SEQ ID NO: 13598 - protein, 15 aa, synthetic construct
GEPLQRRGTPGRQEC

SEQ ID NO: 13599 - protein, 15 aa, synthetic construct
GEPNGLGGEKKAAGA

SEQ ID NO: 13600 - protein, 15 aa, synthetic construct
GEPPGQAGGPDEPAG

SEQ ID NO: 13601 - protein, 15 aa, synthetic construct
GEPPGRAAPAAPAPG

SEQ ID NO: 13602 - protein, 15 aa, synthetic construct
GEPPPAAAPRRDPRP

SEQ ID NO: 13603 - protein, 15 aa, synthetic construct
GEPPSVRGDLVCAAG

SEQ ID NO: 13604 - protein, 15 aa, synthetic construct
GEPQDAQLGDQQAPG

SEQ ID NO: 13605 - protein, 15 aa, synthetic construct
GEPRRARPQPAPEAA

SEQ ID NO: 13606 - protein, 15 aa, synthetic construct
GEPRTSARAAAAAAA

SEQ ID NO: 13607 - protein, 15 aa, synthetic construct
GEPSGERWLLGRAQG

SEQ ID NO: 13608 - protein, 15 aa, synthetic construct
GEPVAGVQGAGRPLE

SEQ ID NO: 13609 - protein, 15 aa, synthetic construct
GEPVYALGSSGHMLC

SEQ ID NO: 13610 - protein, 15 aa, synthetic construct
GEQAAGEGAQGQRQR

SEQ ID NO: 13611 - protein, 15 aa, synthetic construct
GEQADHLHRRAARQL

SEQ ID NO: 13612 - protein, 15 aa, synthetic construct
GEQKTATARGSRQAE

SEQ ID NO: 13613 - protein, 15 aa, synthetic construct
GEQQKWGPVQGDPGG

SEQ ID NO: 13614 - protein, 15 aa, synthetic construct
GEQRGGNPSTHSIQG

SEQ ID NO: 13615 - protein, 15 aa, synthetic construct
GEQRPTGYLAPAAVA

SEQ ID NO: 13616 - protein, 15 aa, synthetic construct
GEQSQPPTLPDALYL

SEQ ID NO: 13617 - protein, 15 aa, synthetic construct
GEQTDLLPGPQRGPQ

SEQ ID NO: 13618 - protein, 12 aa, synthetic construct
GERAGGAPAAPA

SEQ ID NO: 13619 - protein, 15 aa, synthetic construct
GERAGPPARDPRLFG

SEQ ID NO: 13620 - protein, 15 aa, synthetic construct
GERAGRRAGPAAQQE

SEQ ID NO: 13621 - protein, 15 aa, synthetic construct
GERAHQDGGGGAGPL

SEQ ID NO: 13622 - protein, 15 aa, synthetic construct
GERDCGRSEALHLHY

SEQ ID NO: 13623 - protein, 15 aa, synthetic construct
GERDGEKGIPHPTRQ

SEQ ID NO: 13624 - protein, 15 aa, synthetic construct
GERDSPEWNVEGKQS

SEQ ID NO: 13625 - protein, 15 aa, synthetic construct
GERGAAVPGERGGLG

SEQ ID NO: 13626 - protein, 14 aa, synthetic construct
GERGDRQERQRGGE

SEQ ID NO: 13627 - protein, 15 aa, synthetic construct
GERGGEDDLAVQRDP

SEQ ID NO: 13628 - protein, 15 aa, synthetic construct
GERNCTCSRSPHPGF

SEQ ID NO: 13629 - protein, 15 aa, synthetic construct
GERNFYSPSGAVHDQ

SEQ ID NO: 13630 - protein, 14 aa, synthetic construct
GERPACGAGGGRTP

SEQ ID NO: 13631 - protein, 12 aa, synthetic construct
GERPGAVLHGEL

SEQ ID NO: 13632 - protein, 15 aa, synthetic construct
GERRWECSGRGPRGG

SEQ ID NO: 13633 - protein, 15 aa, synthetic construct
GERRWPGLQEGLGGS

SEQ ID NO: 13634 - protein, 15 aa, synthetic construct
GERSGPQGRRGPEGL

SEQ ID NO: 13635 - protein, 15 aa, synthetic construct
GERSGVQPHYGGGPG

SEQ ID NO: 13636 - protein, 15 aa, synthetic construct
GERSPRRRLPVLGRR

SEQ ID NO: 13637 - protein, 15 aa, synthetic construct
GERSVGRGLREIPGG

SEQ ID NO: 13638 - protein, 15 aa, synthetic construct
GESARRDGDRAQGAE

SEQ ID NO: 13639 - protein, 15 aa, synthetic construct
GESDGATQPPDALAA

SEQ ID NO: 13640 - protein, 14 aa, synthetic construct
GESECGQVALHEPR

SEQ ID NO: 13641 - protein, 15 aa, synthetic construct
GESEGVARPSAPGCR

SEQ ID NO: 13642 - protein, 15 aa, synthetic construct
GESGCASRALSGHQA

SEQ ID NO: 13643 - protein, 15 aa, synthetic construct
GESGGSEPRRRLWRP

SEQ ID NO: 13644 - protein, 15 aa, synthetic construct
GESKPSLRAVPSKDP

SEQ ID NO: 13645 - protein, 15 aa, synthetic construct
GESQTRAAASAAPVA

SEQ ID NO: 13646 - protein, 15 aa, synthetic construct
GESREGEYRGPHVRR

SEQ ID NO: 13647 - protein, 15 aa, synthetic construct
GESSESGVRGPGRGG

SEQ ID NO: 13648 - protein, 15 aa, synthetic construct
GETGEERMRVEALPE

SEQ ID NO: 13649 - protein, 15 aa, synthetic construct
GEVASSKGGHGAGGP

SEQ ID NO: 13650 - protein, 15 aa, synthetic construct
GEVFPGPERAPEFLG

SEQ ID NO: 13651 - protein, 15 aa, synthetic construct
GEVGFSYSQGYRQQD

SEQ ID NO: 13652 - protein, 15 aa, synthetic construct
GEVLGHLPSGQGQPG

SEQ ID NO: 13653 - protein, 15 aa, synthetic construct
GEVPGELYPGGDSGA

SEQ ID NO: 13654 - protein, 15 aa, synthetic construct
GEVPSWEPPGATGQL

SEQ ID NO: 13655 - protein, 15 aa, synthetic construct
GEVRAEAGPAEHSCS

SEQ ID NO: 13656 - protein, 15 aa, synthetic construct
GEVRGQRPVMPAGTP

SEQ ID NO: 13657 - protein, 15 aa, synthetic construct
GEVWDEFRGRPEQEG

SEQ ID NO: 13658 - protein, 15 aa, synthetic construct
GEWKLGGHRSTLWQS

SEQ ID NO: 13659 - protein, 15 aa, synthetic construct
GEYGGGGAAAPGEGG

SEQ ID NO: 13660 - protein, 13 aa, synthetic construct
GEYNQERKQRPGG

SEQ ID NO: 13661 - protein, 15 aa, synthetic construct
GFASEAPDPGLGQRC

SEQ ID NO: 13662 - protein, 12 aa, synthetic construct
GFGFGEPGDPLH

SEQ ID NO: 13663 - protein, 15 aa, synthetic construct
GFGQTQPPPRQGHSP

SEQ ID NO: 13664 - protein, 15 aa, synthetic construct
GFHKLQQSESSSANL

SEQ ID NO: 13665 - protein, 15 aa, synthetic construct
GFLAENADLSRNAGR

SEQ ID NO: 13666 - protein, 15 aa, synthetic construct
GFLDEEEEIQIPNYF

SEQ ID NO: 13667 - protein, 15 aa, synthetic construct
GFLNYLPGALPDLGP

SEQ ID NO: 13668 - protein, 15 aa, synthetic construct
GFPAELRAARAAAAA

SEQ ID NO: 13669 - protein, 15 aa, synthetic construct
GFPGPERTAASLRLR

SEQ ID NO: 13670 - protein, 15 aa, synthetic construct
GFPLAPLLLLPCGGR

SEQ ID NO: 13671 - protein, 15 aa, synthetic construct
GFQSQKLPQKPELLL

SEQ ID NO: 13672 - protein, 14 aa, synthetic construct
GFREKLSDSSDQQD

SEQ ID NO: 13673 - protein, 15 aa, synthetic construct
GFRGRDDGPGQLGGG

SEQ ID NO: 13674 - protein, 15 aa, synthetic construct
GFRLQEAQRCLHRPK

SEQ ID NO: 13675 - protein, 15 aa, synthetic construct
GFRTGPPAGGASGAP

SEQ ID NO: 13676 - protein, 15 aa, synthetic construct
GFSGLGRPQGAAASP

SEQ ID NO: 13677 - protein, 15 aa, synthetic construct
GFSLEETAACGKTCI

SEQ ID NO: 13678 - protein, 14 aa, synthetic construct
GFSNFTEGASMLEK

SEQ ID NO: 13679 - protein, 15 aa, synthetic construct
GFTEKSQSAVGVELD

SEQ ID NO: 13680 - protein, 15 aa, synthetic construct
GFVAVGAGDPGHGGH

SEQ ID NO: 13681 - protein, 15 aa, synthetic construct
GFVPRDRFPDLLAVQ

SEQ ID NO: 13682 - protein, 15 aa, synthetic construct
GGAAAAPPTSEHGLT

SEQ ID NO: 13683 - protein, 15 aa, synthetic construct
GGAAAGADGAGAGLC

SEQ ID NO: 13684 - protein, 15 aa, synthetic construct
GGAAAGGREGRRRRR

SEQ ID NO: 13685 - protein, 15 aa, synthetic construct
GGAADAAGRGNPGGP

SEQ ID NO: 13686 - protein, 15 aa, synthetic construct
GGAAEARAGLQLCQG

SEQ ID NO: 13687 - protein, 15 aa, synthetic construct
GGAAEGDAAVGERGR

SEQ ID NO: 13688 - protein, 15 aa, synthetic construct
GGAAEGGRGRGRGAL

SEQ ID NO: 13689 - protein, 14 aa, synthetic construct
GGAAGGGRWQHHGR

SEQ ID NO: 13690 - protein, 14 aa, synthetic construct
GGAAGPAGRARGWL

SEQ ID NO: 13691 - protein, 15 aa, synthetic construct
GGAAGPGGPRWQLPG

SEQ ID NO: 13692 - protein, 15 aa, synthetic construct
GGAAGQGGPGAGAAG

SEQ ID NO: 13693 - protein, 15 aa, synthetic construct
GGAAGQRHEPGALVD

SEQ ID NO: 13694 - protein, 15 aa, synthetic construct
GGAAGRGTTREPLTK

SEQ ID NO: 13695 - protein, 15 aa, synthetic construct
GGAAPGSCPQQPHQP

SEQ ID NO: 13696 - protein, 15 aa, synthetic construct
GGAARARSCQEGHRL

SEQ ID NO: 13697 - protein, 15 aa, synthetic construct
GGAARGHRLAVCRQG

SEQ ID NO: 13698 - protein, 12 aa, synthetic construct
GGAATGTAELSL

SEQ ID NO: 13699 - protein, 15 aa, synthetic construct
GGAATVPDAAAASEV

SEQ ID NO: 13700 - protein, 15 aa, synthetic construct
GGACQGCPAPAGAFA

SEQ ID NO: 13701 - protein, 15 aa, synthetic construct
GGADGGRDGVGRAPG

SEQ ID NO: 13702 - protein, 15 aa, synthetic construct
GGADPEEATGRSGEI

SEQ ID NO: 13703 - protein, 15 aa, synthetic construct
GGADWAVGDVRAPRR

SEQ ID NO: 13704 - protein, 15 aa, synthetic construct
GGAEEGRRPQREVLR

SEQ ID NO: 13705 - protein, 15 aa, synthetic construct
GGAEGCPRTAVPRAA

SEQ ID NO: 13706 - protein, 15 aa, synthetic construct
GGAEGEPLGEDPTGA

SEQ ID NO: 13707 - protein, 15 aa, synthetic construct
GGAEGVRAAFGLADV

SEQ ID NO: 13708 - protein, 15 aa, synthetic construct
GGAEPAPGRQVFRGA

SEQ ID NO: 13709 - protein, 15 aa, synthetic construct
GGAEPEGSCAPPGGA

SEQ ID NO: 13710 - protein, 15 aa, synthetic construct
GGAEREEETWLQPLL

SEQ ID NO: 13711 - protein, 15 aa, synthetic construct
GGAERGRDEAPHSGH

SEQ ID NO: 13712 - protein, 15 aa, synthetic construct
GGAERGVLVHLPAQG

SEQ ID NO: 13713 - protein, 15 aa, synthetic construct
GGAERQQREPLHVLL

SEQ ID NO: 13714 - protein, 15 aa, synthetic construct
GGAESSWAGDEPSGP

SEQ ID NO: 13715 - protein, 15 aa, synthetic construct
GGAFEDSERLGASPQ

SEQ ID NO: 13716 - protein, 15 aa, synthetic construct
GGAGCSGGRGAGRRQ

SEQ ID NO: 13717 - protein, 15 aa, synthetic construct
GGAGDPDGTARERGS

SEQ ID NO: 13718 - protein, 15 aa, synthetic construct
GGAGEGPRGLPEAQL

SEQ ID NO: 13719 - protein, 15 aa, synthetic construct
GGAGEPAHRRRGTVL

SEQ ID NO: 13720 - protein, 15 aa, synthetic construct
GGAGEPGIRQGRLRA

SEQ ID NO: 13721 - protein, 15 aa, synthetic construct
GGAGERGAGRAAVGP

SEQ ID NO: 13722 - protein, 14 aa, synthetic construct
GGAGGGGSVLSRSP

SEQ ID NO: 13723 - protein, 15 aa, synthetic construct
GGAGGPRVARGADPP

SEQ ID NO: 13724 - protein, 15 aa, synthetic construct
GGAGGRRGGGGRRRP

SEQ ID NO: 13725 - protein, 15 aa, synthetic construct
GGAGLRARGLQAEGG

SEQ ID NO: 13726 - protein, 15 aa, synthetic construct
GGAGPGAAAADAVGA

SEQ ID NO: 13727 - protein, 15 aa, synthetic construct
GGAGPREEGPPARRH

SEQ ID NO: 13728 - protein, 15 aa, synthetic construct
GGAGRAGGRQTGRQW

SEQ ID NO: 13729 - protein, 15 aa, synthetic construct
GGAGRPRCPRSALET

SEQ ID NO: 13730 - protein, 15 aa, synthetic construct
GGAGRRAWAGVGGAP

SEQ ID NO: 13731 - protein, 15 aa, synthetic construct
GGAGVRAPRAPPAAL

SEQ ID NO: 13732 - protein, 15 aa, synthetic construct
GGAGWAAPAAAVHAD

SEQ ID NO: 13733 - protein, 15 aa, synthetic construct
GGAHALSEAGEVCAP

SEQ ID NO: 13734 - protein, 15 aa, synthetic construct
GGAHPGPRRREAAGQ

SEQ ID NO: 13735 - protein, 15 aa, synthetic construct
GGAHQPGPPHDGGRL

SEQ ID NO: 13736 - protein, 15 aa, synthetic construct
GGANGPGRAHGSPEG

SEQ ID NO: 13737 - protein, 15 aa, synthetic construct
GGANSCHKQAPGRLQ

SEQ ID NO: 13738 - protein, 15 aa, synthetic construct
GGANSNCGHHFHSRN

SEQ ID NO: 13739 - protein, 15 aa, synthetic construct
GGAPAGARARLGSQS

SEQ ID NO: 13740 - protein, 15 aa, synthetic construct
GGAPCTSRQGVPAAG

SEQ ID NO: 13741 - protein, 15 aa, synthetic construct
GGAPEETAAAREAFG

SEQ ID NO: 13742 - protein, 15 aa, synthetic construct
GGAPEREGHRPRPDK

SEQ ID NO: 13743 - protein, 15 aa, synthetic construct
GGAPGEFAACQGPRG

SEQ ID NO: 13744 - protein, 15 aa, synthetic construct
GGAPGERGGAPGERG

SEQ ID NO: 13745 - protein, 15 aa, synthetic construct
GGAPGLPALSLGASP

SEQ ID NO: 13746 - protein, 15 aa, synthetic construct
GGAPGPPPTLPPGLL

SEQ ID NO: 13747 - protein, 15 aa, synthetic construct
GGAPRTPPLPPLPTP

SEQ ID NO: 13748 - protein, 15 aa, synthetic construct
GGAQAAACQAVGRHG

SEQ ID NO: 13749 - protein, 15 aa, synthetic construct
GGAQEEVRRAGPGGP

SEQ ID NO: 13750 - protein, 15 aa, synthetic construct
GGAQVERVGPLDPGK

SEQ ID NO: 13751 - protein, 12 aa, synthetic construct
GGAQWHSERFGK

SEQ ID NO: 13752 - protein, 13 aa, synthetic construct
GGARAAAGSGKTL

SEQ ID NO: 13753 - protein, 15 aa, synthetic construct
GGARAGPGGRGGERL

SEQ ID NO: 13754 - protein, 15 aa, synthetic construct
GGARAPIPSSPQGCP

SEQ ID NO: 13755 - protein, 15 aa, synthetic construct
GGARGAGPRRAQSVR

SEQ ID NO: 13756 - protein, 15 aa, synthetic construct
GGARKADAVRGGGGL

SEQ ID NO: 13757 - protein, 15 aa, synthetic construct
GGARQRADPAPARAH

SEQ ID NO: 13758 - protein, 15 aa, synthetic construct
GGARRAGPLPRREPL

SEQ ID NO: 13759 - protein, 13 aa, synthetic construct
GGARVQLFADYIQ

SEQ ID NO: 13760 - protein, 15 aa, synthetic construct
GGASADTGAAGCPGG

SEQ ID NO: 13761 - protein, 15 aa, synthetic construct
GGASRRLVSAPVAWD

SEQ ID NO: 13762 - protein, 15 aa, synthetic construct
GGATGAGPRPAAGSS

SEQ ID NO: 13763 - protein, 15 aa, synthetic construct
GGAVSDPCCGCREPF

SEQ ID NO: 13764 - protein, 15 aa, synthetic construct
GGAVVRPTPGASHRV

SEQ ID NO: 13765 - protein, 15 aa, synthetic construct
GGCATAAATAAAATA

SEQ ID NO: 13766 - protein, 15 aa, synthetic construct
GGCAVRAAGIRAAGH

SEQ ID NO: 13767 - protein, 15 aa, synthetic construct
GGCCRPQGDEKDVHC

SEQ ID NO: 13768 - protein, 15 aa, synthetic construct
GGCDARLPALGLAPR

SEQ ID NO: 13769 - protein, 15 aa, synthetic construct
GGCEGPGGLEARCGI

SEQ ID NO: 13770 - protein, 12 aa, synthetic construct
GGCESAARRLGV

SEQ ID NO: 13771 - protein, 15 aa, synthetic construct
GGCGAGGDAVAAGLG

SEQ ID NO: 13772 - protein, 15 aa, synthetic construct
GGCGGRGQLLGGGGG

SEQ ID NO: 13773 - protein, 15 aa, synthetic construct
GGCGGSSGVVIRGAA

SEQ ID NO: 13774 - protein, 15 aa, synthetic construct
GGCGPEAARASGAGG

SEQ ID NO: 13775 - protein, 15 aa, synthetic construct
GGCGSGGGGGGGRGC

SEQ ID NO: 13776 - protein, 15 aa, synthetic construct
GGCICCSLAGPPQQA

SEQ ID NO: 13777 - protein, 15 aa, synthetic construct
GGCRGVRCGNGGDRA

SEQ ID NO: 13778 - protein, 15 aa, synthetic construct
GGCRSEYSGLFRGGS

SEQ ID NO: 13779 - protein, 15 aa, synthetic construct
GGCSSSERPSSAGTL

SEQ ID NO: 13780 - protein, 15 aa, synthetic construct
GGDAEAAAPGSDGRP

SEQ ID NO: 13781 - protein, 15 aa, synthetic construct
GGDDGGGVHAAAAHP

SEQ ID NO: 13782 - protein, 15 aa, synthetic construct
GGDGAERSGGARPGS

SEQ ID NO: 13783 - protein, 15 aa, synthetic construct
GGDGAGAGLEADVLV

SEQ ID NO: 13784 - protein, 15 aa, synthetic construct
GGDGATLAARAAGPC

SEQ ID NO: 13785 - protein, 15 aa, synthetic construct
GGDGECRGRRDRREA

SEQ ID NO: 13786 - protein, 15 aa, synthetic construct
GGDGGGGAAAIRAVG

SEQ ID NO: 13787 - protein, 15 aa, synthetic construct
GGDGGRSGGRGGHGA

SEQ ID NO: 13788 - protein, 15 aa, synthetic construct
GGDGISRRPGAAPAV

SEQ ID NO: 13789 - protein, 15 aa, synthetic construct
GGDGLVGESADSPED

SEQ ID NO: 13790 - protein, 15 aa, synthetic construct
GGDGPGRWRQRSRAR

SEQ ID NO: 13791 - protein, 15 aa, synthetic construct
GGDHRGGAGAEEAPA

SEQ ID NO: 13792 - protein, 15 aa, synthetic construct
GGDLRARQQEAERAP

SEQ ID NO: 13793 - protein, 15 aa, synthetic construct
GGDQDYLPHGRGGDA

SEQ ID NO: 13794 - protein, 15 aa, synthetic construct
GGDQHGRCTPDCVDL

SEQ ID NO: 13795 - protein, 15 aa, synthetic construct
GGDRGGGGCGGNRVG

SEQ ID NO: 13796 - protein, 15 aa, synthetic construct
GGDRGQAAAGFPCER

SEQ ID NO: 13797 - protein, 15 aa, synthetic construct
GGDRGQAAAGFPCGR

SEQ ID NO: 13798 - protein, 15 aa, synthetic construct
GGDRPRPLSEEPPST

SEQ ID NO: 13799 - protein, 12 aa, synthetic construct
GGDSGQRGALDG

SEQ ID NO: 13800 - protein, 15 aa, synthetic construct
GGDSRPGTPAHLDLH

SEQ ID NO: 13801 - protein, 15 aa, synthetic construct
GGDTGGSGGGGKRSR

SEQ ID NO: 13802 - protein, 15 aa, synthetic construct
GGDVSALRGEPDPAG

SEQ ID NO: 13803 - protein, 15 aa, synthetic construct
GGEAAESDRAAVGAA

SEQ ID NO: 13804 - protein, 15 aa, synthetic construct
GGEAEPPEWGHSAQP

SEQ ID NO: 13805 - protein, 14 aa, synthetic construct
GGEAGAETEVARGG

SEQ ID NO: 13806 - protein, 15 aa, synthetic construct
GGEAPSLAGGSPFNL

SEQ ID NO: 13807 - protein, 15 aa, synthetic construct
GGEARPATASAPSQP

SEQ ID NO: 13808 - protein, 13 aa, synthetic construct
GGEDVACVVDTLC

SEQ ID NO: 13809 - protein, 15 aa, synthetic construct
GGEEECSVVSRSLRG

SEQ ID NO: 13810 - protein, 15 aa, synthetic construct
GGEIRRGRAGRPRRR

SEQ ID NO: 13811 - protein, 15 aa, synthetic construct
GGELEELLRGGAHLP

SEQ ID NO: 13812 - protein, 14 aa, synthetic construct
GGELPLPAAARSHR

SEQ ID NO: 13813 - protein, 15 aa, synthetic construct
GGEPEPERASAARGL

SEQ ID NO: 13814 - protein, 15 aa, synthetic construct
GGEQRESGHRPRARA

SEQ ID NO: 13815 - protein, 15 aa, synthetic construct
GGEQRSRRQEQRERR

SEQ ID NO: 13816 - protein, 15 aa, synthetic construct
GGERAGRRPLPFAAA

SEQ ID NO: 13817 - protein, 15 aa, synthetic construct
GGERASAEAGAALQA

SEQ ID NO: 13818 - protein, 15 aa, synthetic construct
GGEREPPGKAPRPPC

SEQ ID NO: 13819 - protein, 12 aa, synthetic construct
GGERGGVRPPKE

SEQ ID NO: 13820 - protein, 15 aa, synthetic construct
GGERGRDPQHPGGVR

SEQ ID NO: 13821 - protein, 15 aa, synthetic construct
GGERRGQRGPRTEGR

SEQ ID NO: 13822 - protein, 15 aa, synthetic construct
GGESEPHREPPRSPH

SEQ ID NO: 13823 - protein, 15 aa, synthetic construct
GGESFGGARAGAPRL

SEQ ID NO: 13824 - protein, 15 aa, synthetic construct
GGEVDLGRQELPAAG

SEQ ID NO: 13825 - protein, 15 aa, synthetic construct
GGEVPARADGGEGLP

SEQ ID NO: 13826 - protein, 15 aa, synthetic construct
GGFDCERPSGGSFST

SEQ ID NO: 13827 - protein, 15 aa, synthetic construct
GGFQVGAQGRGPALC

SEQ ID NO: 13828 - protein, 15 aa, synthetic construct
GGFSGGGGNAEPRGS

SEQ ID NO: 13829 - protein, 15 aa, synthetic construct
GGGAAAVARSCSGGP

SEQ ID NO: 13830 - protein, 15 aa, synthetic construct
GGGAAGADQRERPVQ

SEQ ID NO: 13831 - protein, 15 aa, synthetic construct
GGGAAQSPGGEVLGG

SEQ ID NO: 13832 - protein, 15 aa, synthetic construct
GGGAARRRRRRRRRG

SEQ ID NO: 13833 - protein, 15 aa, synthetic construct
GGGAASPAGALLQAW

SEQ ID NO: 13834 - protein, 15 aa, synthetic construct
GGGAEAAAGVEPPEA

SEQ ID NO: 13835 - protein, 13 aa, synthetic construct
GGGAEQDRNPDSF

SEQ ID NO: 13836 - protein, 15 aa, synthetic construct
GGGAGAAPVAPRALG

SEQ ID NO: 13837 - protein, 15 aa, synthetic construct
GGGAGLPAGARREGA

SEQ ID NO: 13838 - protein, 15 aa, synthetic construct
GGGAGPGTGLGSQAV

SEQ ID NO: 13839 - protein, 15 aa, synthetic construct
GGGAGRHPRSWHLEE

SEQ ID NO: 13840 - protein, 15 aa, synthetic construct
GGGALGGDGAANAGP

SEQ ID NO: 13841 - protein, 15 aa, synthetic construct
GGGAPAGAGPGLPPF

SEQ ID NO: 13842 - protein, 15 aa, synthetic construct
GGGAPAGRARLPAVR

SEQ ID NO: 13843 - protein, 15 aa, synthetic construct
GGGARGARGDAALVG

SEQ ID NO: 13844 - protein, 15 aa, synthetic construct
GGGARGPAGGGVAGP

SEQ ID NO: 13845 - protein, 15 aa, synthetic construct
GGGASGVRLAGEPAG

SEQ ID NO: 13846 - protein, 15 aa, synthetic construct
GGGATGGAEGVRGGD

SEQ ID NO: 13847 - protein, 15 aa, synthetic construct
GGGAVPGPQPRELAV

SEQ ID NO: 13848 - protein, 15 aa, synthetic construct
GGGAVRPEAGPALAL

SEQ ID NO: 13849 - protein, 15 aa, synthetic construct
GGGAWAPGRGGLGGR

SEQ ID NO: 13850 - protein, 15 aa, synthetic construct
GGGCFLSGPEPAGLC

SEQ ID NO: 13851 - protein, 15 aa, synthetic construct
GGGCNSRNNSHNIRS

SEQ ID NO: 13852 - protein, 15 aa, synthetic construct
GGGCRGDEVVAAVAG

SEQ ID NO: 13853 - protein, 12 aa, synthetic construct
GGGCSRNCNIPE

SEQ ID NO: 13854 - protein, 15 aa, synthetic construct
GGGCTEGRPAAAEPA

SEQ ID NO: 13855 - protein, 15 aa, synthetic construct
GGGDARGAGALAPGG

SEQ ID NO: 13856 - protein, 15 aa, synthetic construct
GGGDDLLPAAEPVWR

SEQ ID NO: 13857 - protein, 15 aa, synthetic construct
GGGDGGSGVAAPVGC

SEQ ID NO: 13858 - protein, 15 aa, synthetic construct
GGGDGRGSPGGGRSP

SEQ ID NO: 13859 - protein, 15 aa, synthetic construct
GGGDPAQASDPQADP

SEQ ID NO: 13860 - protein, 15 aa, synthetic construct
GGGDSGFSQTPRPTD

SEQ ID NO: 13861 - protein, 15 aa, synthetic construct
GGGEAQGPPAAQLVP

SEQ ID NO: 13862 - protein, 15 aa, synthetic construct
GGGEARRERPGFPAR

SEQ ID NO: 13863 - protein, 15 aa, synthetic construct
GGGEDPEPQGRGGPS

SEQ ID NO: 13864 - protein, 15 aa, synthetic construct
GGGEGGSVGGGRGGP

SEQ ID NO: 13865 - protein, 15 aa, synthetic construct
GGGEGWVPGRPGARG

SEQ ID NO: 13866 - protein, 15 aa, synthetic construct
GGGEKSGWAGTKAGS

SEQ ID NO: 13867 - protein, 15 aa, synthetic construct
GGGERGQPGERPGRL

SEQ ID NO: 13868 - protein, 15 aa, synthetic construct
GGGFSAPDWDAPAAP

SEQ ID NO: 13869 - protein, 15 aa, synthetic construct
GGGGCVAAGAAGGGA

SEQ ID NO: 13870 - protein, 15 aa, synthetic construct
GGGGDRGPAGGAALW

SEQ ID NO: 13871 - protein, 15 aa, synthetic construct
GGGGEPQRRGDEPRE

SEQ ID NO: 13872 - protein, 15 aa, synthetic construct
GGGGESGARGGAEGA

SEQ ID NO: 13873 - protein, 15 aa, synthetic construct
GGGGGAALGGEEGAA

SEQ ID NO: 13874 - protein, 15 aa, synthetic construct
GGGGGAARGGPGSRA

SEQ ID NO: 13875 - protein, 15 aa, synthetic construct
GGGGGCRRGAPGAGV

SEQ ID NO: 13876 - protein, 15 aa, synthetic construct
GGGGGDGRAGERPER

SEQ ID NO: 13877 - protein, 15 aa, synthetic construct
GGGGGEGGGGGGSGL

SEQ ID NO: 13878 - protein, 15 aa, synthetic construct
GGGGGGGCSYERDRR

SEQ ID NO: 13879 - protein, 15 aa, synthetic construct
GGGGGGGGDRRGGGG

SEQ ID NO: 13880 - protein, 13 aa, synthetic construct
GGGGGGGGGLGLL

SEQ ID NO: 13881 - protein, 15 aa, synthetic construct
GGGGGGGGQGVGHDP

SEQ ID NO: 13882 - protein, 15 aa, synthetic construct
GGGGGGGRGGGGARW

SEQ ID NO: 13883 - protein, 15 aa, synthetic construct
GGGGGGGRGPGDGPR

SEQ ID NO: 13884 - protein, 15 aa, synthetic construct
GGGGGGGVPESPVST

SEQ ID NO: 13885 - protein, 15 aa, synthetic construct
GGGGGGGWCCRVGSS

SEQ ID NO: 13886 - protein, 15 aa, synthetic construct
GGGGGGPGGGGAAAR

SEQ ID NO: 13887 - protein, 15 aa, synthetic construct
GGGGGGRAPGGRRGG

SEQ ID NO: 13888 - protein, 15 aa, synthetic construct
GGGGGGRGGGGPSPG

SEQ ID NO: 13889 - protein, 15 aa, synthetic construct
GGGGGGRHHGRLQQR

SEQ ID NO: 13890 - protein, 15 aa, synthetic construct
GGGGGGRKRDAPRGG

SEQ ID NO: 13891 - protein, 15 aa, synthetic construct
GGGGGGSGSHSLCGQ

SEQ ID NO: 13892 - protein, 15 aa, synthetic construct
GGGGGIWCAWPGGLE

SEQ ID NO: 13893 - protein, 15 aa, synthetic construct
GGGGGPCSAGSRPTR

SEQ ID NO: 13894 - protein, 15 aa, synthetic construct
GGGGGPECPEDGRGQ

SEQ ID NO: 13895 - protein, 15 aa, synthetic construct
GGGGGRAESRGRRRR

SEQ ID NO: 13896 - protein, 15 aa, synthetic construct
GGGGGRFGAGGRRPR

SEQ ID NO: 13897 - protein, 15 aa, synthetic construct
GGGGGRQRETGGAAL

SEQ ID NO: 13898 - protein, 14 aa, synthetic construct
GGGGGSGGRGRGAP

SEQ ID NO: 13899 - protein, 15 aa, synthetic construct
GGGGGTHGRSELEGL

SEQ ID NO: 13900 - protein, 15 aa, synthetic construct
GGGGGVPGGGGDGHL

SEQ ID NO: 13901 - protein, 15 aa, synthetic construct
GGGGIVPGAGLQQAA

SEQ ID NO: 13902 - protein, 15 aa, synthetic construct
GGGGLGPNLSAPDPP

SEQ ID NO: 13903 - protein, 15 aa, synthetic construct
GGGGLRAGGQAEPDL

SEQ ID NO: 13904 - protein, 15 aa, synthetic construct
GGGGQAAPAPGQPVA

SEQ ID NO: 13905 - protein, 15 aa, synthetic construct
GGGGRAGGSGPQLPR

SEQ ID NO: 13906 - protein, 15 aa, synthetic construct
GGGGRCSASPAAPPR

SEQ ID NO: 13907 - protein, 15 aa, synthetic construct
GGGGRGAAAPAPGGA

SEQ ID NO: 13908 - protein, 12 aa, synthetic construct
GGGGRGKPGVLA

SEQ ID NO: 13909 - protein, 15 aa, synthetic construct
GGGGRGRSPRRQEPS

SEQ ID NO: 13910 - protein, 15 aa, synthetic construct
GGGGRGSARAATAPG

SEQ ID NO: 13911 - protein, 15 aa, synthetic construct
GGGGRPLLEAPVAGH

SEQ ID NO: 13912 - protein, 15 aa, synthetic construct
GGGGRQGGRVVPRRG

SEQ ID NO: 13913 - protein, 15 aa, synthetic construct
GGGGSCYGAEGPGGE

SEQ ID NO: 13914 - protein, 15 aa, synthetic construct
GGGGSDEHPDAAGGG

SEQ ID NO: 13915 - protein, 14 aa, synthetic construct
GGGGSRAEPGRRDP

SEQ ID NO: 13916 - protein, 15 aa, synthetic construct
GGGGWDAAAGLAAGG

SEQ ID NO: 13917 - protein, 15 aa, synthetic construct
GGGGWGEGGDPAALA

SEQ ID NO: 13918 - protein, 15 aa, synthetic construct
GGGHPGPLRAGAPAA

SEQ ID NO: 13919 - protein, 15 aa, synthetic construct
GGGLETPKGKVSPAL

SEQ ID NO: 13920 - protein, 15 aa, synthetic construct
GGGLLRGEEAETVQF

SEQ ID NO: 13921 - protein, 15 aa, synthetic construct
GGGLQLARVPRGQPG

SEQ ID NO: 13922 - protein, 15 aa, synthetic construct
GGGLRGGDALLGKPD

SEQ ID NO: 13923 - protein, 15 aa, synthetic construct
GGGNGGGSSREWWWW

SEQ ID NO: 13924 - protein, 15 aa, synthetic construct
GGGPALAPSERSFRF

SEQ ID NO: 13925 - protein, 15 aa, synthetic construct
GGGPGPGRRRRRRRR

SEQ ID NO: 13926 - protein, 15 aa, synthetic construct
GGGPRAAGPGGRVDA

SEQ ID NO: 13927 - protein, 15 aa, synthetic construct
GGGPRRPPRGGQRGA

SEQ ID NO: 13928 - protein, 15 aa, synthetic construct
GGGPTRGPAARAAAP

SEQ ID NO: 13929 - protein, 15 aa, synthetic construct
GGGQEDPNFADGEHP

SEQ ID NO: 13930 - protein, 15 aa, synthetic construct
GGGQGAQAQRLPEWE

SEQ ID NO: 13931 - protein, 15 aa, synthetic construct
GGGQRVCGQPAEPGT

SEQ ID NO: 13932 - protein, 15 aa, synthetic construct
GGGQSYYAGRWRGAR

SEQ ID NO: 13933 - protein, 15 aa, synthetic construct
GGGRAASGSGTGAST

SEQ ID NO: 13934 - protein, 15 aa, synthetic construct
GGGRAGRGPRRPGLA

SEQ ID NO: 13935 - protein, 15 aa, synthetic construct
GGGRARELGPAGAGR

SEQ ID NO: 13936 - protein, 15 aa, synthetic construct
GGGRATGAAAPGHSK

SEQ ID NO: 13937 - protein, 15 aa, synthetic construct
GGGREPAAGGGAGWL

SEQ ID NO: 13938 - protein, 15 aa, synthetic construct
GGGRGAGVDSRPWLR

SEQ ID NO: 13939 - protein, 15 aa, synthetic construct
GGGRGARARRPGQRG

SEQ ID NO: 13940 - protein, 15 aa, synthetic construct
GGGRGGDRLAGQGSG

SEQ ID NO: 13941 - protein, 15 aa, synthetic construct
GGGRGGGGAQPGNRS

SEQ ID NO: 13942 - protein, 15 aa, synthetic construct
GGGRGGGGGGRRGWG

SEQ ID NO: 13943 - protein, 15 aa, synthetic construct
GGGRGGGRVRAGGAP

SEQ ID NO: 13944 - protein, 15 aa, synthetic construct
GGGRGGGSSGGCQAP

SEQ ID NO: 13945 - protein, 15 aa, synthetic construct
GGGRGGRGPRRGGPG

SEQ ID NO: 13946 - protein, 15 aa, synthetic construct
GGGRGRRRLQPRRRR

SEQ ID NO: 13947 - protein, 15 aa, synthetic construct
GGGRPAAAAASARAR

SEQ ID NO: 13948 - protein, 15 aa, synthetic construct
GGGRPAWGAATGRRR

SEQ ID NO: 13949 - protein, 15 aa, synthetic construct
GGGRPEGLAAVGPAP

SEQ ID NO: 13950 - protein, 15 aa, synthetic construct
GGGRRGFAGGGGFRA

SEQ ID NO: 13951 - protein, 15 aa, synthetic construct
GGGRRGGAGGSGALL

SEQ ID NO: 13952 - protein, 15 aa, synthetic construct
GGGRRGGGVPLRGAL

SEQ ID NO: 13953 - protein, 15 aa, synthetic construct
GGGRRGGRLGPRRRH

SEQ ID NO: 13954 - protein, 15 aa, synthetic construct
GGGRRGTGDRPLRPG

SEQ ID NO: 13955 - protein, 15 aa, synthetic construct
GGGRRLGGRAGGSHG

SEQ ID NO: 13956 - protein, 15 aa, synthetic construct
GGGRRQGGAAAQAAL

SEQ ID NO: 13957 - protein, 15 aa, synthetic construct
GGGRRRGGRAAQAAL

SEQ ID NO: 13958 - protein, 15 aa, synthetic construct
GGGRRRGRAGDGAHP

SEQ ID NO: 13959 - protein, 15 aa, synthetic construct
GGGRRSRRGSRGLEL

SEQ ID NO: 13960 - protein, 12 aa, synthetic construct
GGGRSGSTRRRG

SEQ ID NO: 13961 - protein, 15 aa, synthetic construct
GGGRSSGGHGRGGRT

SEQ ID NO: 13962 - protein, 15 aa, synthetic construct
GGGRSTAGVDRGAAA

SEQ ID NO: 13963 - protein, 15 aa, synthetic construct
GGGSAAAAAAARARA

SEQ ID NO: 13964 - protein, 12 aa, synthetic construct
GGGSCTGREKRW

SEQ ID NO: 13965 - protein, 15 aa, synthetic construct
GGGSGEQRQAEPAGR

SEQ ID NO: 13966 - protein, 15 aa, synthetic construct
GGGSGGGGGGSGSGS

SEQ ID NO: 13967 - protein, 15 aa, synthetic construct
GGGSRGSWPVRAAAL

SEQ ID NO: 13968 - protein, 15 aa, synthetic construct
GGGSSRQRDGGGAGA

SEQ ID NO: 13969 - protein, 15 aa, synthetic construct
GGGSTGERDPGGPSG

SEQ ID NO: 13970 - protein, 15 aa, synthetic construct
GGGTEVSTDIRKMVP

SEQ ID NO: 13971 - protein, 15 aa, synthetic construct
GGGTGEPQRRPGPRL

SEQ ID NO: 13972 - protein, 15 aa, synthetic construct
GGGVAASPGAHGAEQ

SEQ ID NO: 13973 - protein, 14 aa, synthetic construct
GGGVCLCGFWFSLV

SEQ ID NO: 13974 - protein, 15 aa, synthetic construct
GGGVGAPGRPGIREP

SEQ ID NO: 13975 - protein, 15 aa, synthetic construct
GGGVNVSGTEADVVA

SEQ ID NO: 13976 - protein, 13 aa, synthetic construct
GGGVWLGAETPSG

SEQ ID NO: 13977 - protein, 15 aa, synthetic construct
GGGWGFPSEAGGIGS

SEQ ID NO: 13978 - protein, 15 aa, synthetic construct
GGGYAACSARPVAPG

SEQ ID NO: 13979 - protein, 15 aa, synthetic construct
GGHGDRDGAADPRVA

SEQ ID NO: 13980 - protein, 15 aa, synthetic construct
GGHGRRPGPGADAEV

SEQ ID NO: 13981 - protein, 15 aa, synthetic construct
GGHPAESGVLLSGQE

SEQ ID NO: 13982 - protein, 15 aa, synthetic construct
GGHPGMDAAVAAAAA

SEQ ID NO: 13983 - protein, 15 aa, synthetic construct
GGHQEENADAEVGQG

SEQ ID NO: 13984 - protein, 15 aa, synthetic construct
GGHQVPALGPEPSRS

SEQ ID NO: 13985 - protein, 15 aa, synthetic construct
GGHRGQAGEGPGGGR

SEQ ID NO: 13986 - protein, 15 aa, synthetic construct
GGIQAKGSPGQSSAA

SEQ ID NO: 13987 - protein, 14 aa, synthetic construct
GGKGDITAADPPTA

SEQ ID NO: 13988 - protein, 15 aa, synthetic construct
GGKPEKTGLKRNFTN

SEQ ID NO: 13989 - protein, 15 aa, synthetic construct
GGKRAAQRNKLAAAA

SEQ ID NO: 13990 - protein, 15 aa, synthetic construct
GGKRVKPGSPGRGRR

SEQ ID NO: 13991 - protein, 15 aa, synthetic construct
GGKSDFHHRVPPTGI

SEQ ID NO: 13992 - protein, 15 aa, synthetic construct
GGLCGTGVVRADVGG

SEQ ID NO: 13993 - protein, 15 aa, synthetic construct
GGLDGLAPAHQGDLE

SEQ ID NO: 13994 - protein, 15 aa, synthetic construct
GGLGAPKPRHFRKTP

SEQ ID NO: 13995 - protein, 15 aa, synthetic construct
GGLGQSPAVHTAGIA

SEQ ID NO: 13996 - protein, 15 aa, synthetic construct
GGLHRGREAADSQSG

SEQ ID NO: 13997 - protein, 15 aa, synthetic construct
GGLIGGEEDRVCNGE

SEQ ID NO: 13998 - protein, 12 aa, synthetic construct
GGLPGSLLPAQL

SEQ ID NO: 13999 - protein, 15 aa, synthetic construct
GGLQSESGGADTTHE

SEQ ID NO: 14000 - protein, 15 aa, synthetic construct
GGLRRRRRRPTCSGM

SEQ ID NO: 14001 - protein, 15 aa, synthetic construct
GGLSGELRGHYGAGL

SEQ ID NO: 14002 - protein, 15 aa, synthetic construct
GGMPTPGWSPTGQTR

SEQ ID NO: 14003 - protein, 15 aa, synthetic construct
GGNESLAPIGPTFPA

SEQ ID NO: 14004 - protein, 15 aa, synthetic construct
GGNGSGSRVPPASRC

SEQ ID NO: 14005 - protein, 15 aa, synthetic construct
GGNQEETAWRLCSSG

SEQ ID NO: 14006 - protein, 15 aa, synthetic construct
GGPAGCPRRRRRRRP

SEQ ID NO: 14007 - protein, 15 aa, synthetic construct
GGPAGRRRRPRAPGP

SEQ ID NO: 14008 - protein, 12 aa, synthetic construct
GGPCSGAAWCGG

SEQ ID NO: 14009 - protein, 15 aa, synthetic construct
GGPDSLGRTPDPGGP

SEQ ID NO: 14010 - protein, 15 aa, synthetic construct
GGPERSSGRAAAGTA

SEQ ID NO: 14011 - protein, 15 aa, synthetic construct
GGPGDSGGGGGPGGR

SEQ ID NO: 14012 - protein, 15 aa, synthetic construct
GGPGEAAGSRDRRSG

SEQ ID NO: 14013 - protein, 15 aa, synthetic construct
GGPGGCAGRCQLPDG

SEQ ID NO: 14014 - protein, 15 aa, synthetic construct
GGPGGERLLPGFLRA

SEQ ID NO: 14015 - protein, 15 aa, synthetic construct
GGPGGGAGRRELPDG

SEQ ID NO: 14016 - protein, 15 aa, synthetic construct
GGPGGLRGGVEGAVP

SEQ ID NO: 14017 - protein, 15 aa, synthetic construct
GGPGGPGEYKGDVEG

SEQ ID NO: 14018 - protein, 15 aa, synthetic construct
GGPGRRRRLRGVGAG

SEQ ID NO: 14019 - protein, 15 aa, synthetic construct
GGPGRVQHQSDVSLQ

SEQ ID NO: 14020 - protein, 14 aa, synthetic construct
GGPLLPLQRRPRLS

SEQ ID NO: 14021 - protein, 12 aa, synthetic construct
GGPPPRPAQAAE

SEQ ID NO: 14022 - protein, 15 aa, synthetic construct
GGPQAAAPAGDVGPG

SEQ ID NO: 14023 - protein, 15 aa, synthetic construct
GGPQEEGLGRPGRRG

SEQ ID NO: 14024 - protein, 15 aa, synthetic construct
GGPRAPGQPQCLGQS

SEQ ID NO: 14025 - protein, 15 aa, synthetic construct
GGPRAPRRTCGRGAG

SEQ ID NO: 14026 - protein, 13 aa, synthetic construct
GGPRGADPTGEPQ

SEQ ID NO: 14027 - protein, 15 aa, synthetic construct
GGPRGECGTGLSEPG

SEQ ID NO: 14028 - protein, 15 aa, synthetic construct
GGPRRAWDRGPARKW

SEQ ID NO: 14029 - protein, 15 aa, synthetic construct
GGPRRGGREVPETVP

SEQ ID NO: 14030 - protein, 15 aa, synthetic construct
GGPRRGRGEAAPENR

SEQ ID NO: 14031 - protein, 15 aa, synthetic construct
GGPSREGEQDRGSAA

SEQ ID NO: 14032 - protein, 15 aa, synthetic construct
GGPSRHGTENDAAGS

SEQ ID NO: 14033 - protein, 15 aa, synthetic construct
GGPSSSQIQPFGDPV

SEQ ID NO: 14034 - protein, 15 aa, synthetic construct
GGQADLGTDGCRALQ

SEQ ID NO: 14035 - protein, 15 aa, synthetic construct
GGQAVRLEPGGSPPA

SEQ ID NO: 14036 - protein, 15 aa, synthetic construct
GGQGEAASVGRQAGN

SEQ ID NO: 14037 - protein, 15 aa, synthetic construct
GGQGLPLLPHGQESE

SEQ ID NO: 14038 - protein, 15 aa, synthetic construct
GGQGVVPGGLQETHG

SEQ ID NO: 14039 - protein, 15 aa, synthetic construct
GGQHAEAEGARQVSP

SEQ ID NO: 14040 - protein, 14 aa, synthetic construct
GGQNARRISEGQFK

SEQ ID NO: 14041 - protein, 15 aa, synthetic construct
GGQPGPPADTGPPDC

SEQ ID NO: 14042 - protein, 13 aa, synthetic construct
GGQPKAAQPGERS

SEQ ID NO: 14043 - protein, 15 aa, synthetic construct
GGQPSEQGVLPTPGC

SEQ ID NO: 14044 - protein, 15 aa, synthetic construct
GGQPTPRSQEAPALD

SEQ ID NO: 14045 - protein, 14 aa, synthetic construct
GGQQAKVTREPAQL

SEQ ID NO: 14046 - protein, 15 aa, synthetic construct
GGQREAEAGGEAPED

SEQ ID NO: 14047 - protein, 15 aa, synthetic construct
GGQREANHAEPQRPP

SEQ ID NO: 14048 - protein, 15 aa, synthetic construct
GGQRETGQPTAQEFQ

SEQ ID NO: 14049 - protein, 15 aa, synthetic construct
GGQRGCGTRAPGGCR

SEQ ID NO: 14050 - protein, 15 aa, synthetic construct
GGQRVPDPLPGGGGR

SEQ ID NO: 14051 - protein, 15 aa, synthetic construct
GGQSWHEPGIPAAAP

SEQ ID NO: 14052 - protein, 15 aa, synthetic construct
GGRAAAGGGGQRRGD

SEQ ID NO: 14053 - protein, 15 aa, synthetic construct
GGRAAPAAAGAVHRA

SEQ ID NO: 14054 - protein, 14 aa, synthetic construct
GGRAERAGVCGGPA

SEQ ID NO: 14055 - protein, 15 aa, synthetic construct
GGRAGGRGESGWQRA

SEQ ID NO: 14056 - protein, 15 aa, synthetic construct
GGRAKDKVVQESTAH

SEQ ID NO: 14057 - protein, 15 aa, synthetic construct
GGRASTCGGAAAAAG

SEQ ID NO: 14058 - protein, 13 aa, synthetic construct
GGRCTSDLRAGVP

SEQ ID NO: 14059 - protein, 15 aa, synthetic construct
GGRDGSAGDGRSYGR

SEQ ID NO: 14060 - protein, 15 aa, synthetic construct
GGRDTGLWRGAGSVR

SEQ ID NO: 14061 - protein, 15 aa, synthetic construct
GGREGTSSAGGREAH

SEQ ID NO: 14062 - protein, 15 aa, synthetic construct
GGREPPAGRLPGPAA

SEQ ID NO: 14063 - protein, 15 aa, synthetic construct
GGRERGPAELAGGVR

SEQ ID NO: 14064 - protein, 15 aa, synthetic construct
GGRERPGEPGPASPA

SEQ ID NO: 14065 - protein, 15 aa, synthetic construct
GGRERPRRRRGLEED

SEQ ID NO: 14066 - protein, 15 aa, synthetic construct
GGRESGERPGGLAGV

SEQ ID NO: 14067 - protein, 15 aa, synthetic construct
GGRETAAPGRSGPGG

SEQ ID NO: 14068 - protein, 15 aa, synthetic construct
GGRGAGERDTPRPCP

SEQ ID NO: 14069 - protein, 15 aa, synthetic construct
GGRGAGGLRGAASGQ

SEQ ID NO: 14070 - protein, 15 aa, synthetic construct
GGRGCPRRGGGRSEA

SEQ ID NO: 14071 - protein, 13 aa, synthetic construct
GGRGDGDGGEGTR

SEQ ID NO: 14072 - protein, 15 aa, synthetic construct
GGRGEAAARLGEAHE

SEQ ID NO: 14073 - protein, 15 aa, synthetic construct
GGRGETEEAGGRQSQ

SEQ ID NO: 14074 - protein, 15 aa, synthetic construct
GGRGGALRPPLAAHP

SEQ ID NO: 14075 - protein, 15 aa, synthetic construct
GGRGGDGHPVGYTAA

SEQ ID NO: 14076 - protein, 15 aa, synthetic construct
GGRGGGGGDSGRRGP

SEQ ID NO: 14077 - protein, 15 aa, synthetic construct
GGRGGGGRDGATGAA

SEQ ID NO: 14078 - protein, 15 aa, synthetic construct
GGRGGRAGAGSGGRG

SEQ ID NO: 14079 - protein, 15 aa, synthetic construct
GGRGPQPSRGGLGGA

SEQ ID NO: 14080 - protein, 15 aa, synthetic construct
GGRGQSGAPGLRSHH

SEQ ID NO: 14081 - protein, 15 aa, synthetic construct
GGRGRGRDSSLSPSQ

SEQ ID NO: 14082 - protein, 12 aa, synthetic construct
GGRGRGRSPGRG

SEQ ID NO: 14083 - protein, 15 aa, synthetic construct
GGRGRRPGGADGRGD

SEQ ID NO: 14084 - protein, 15 aa, synthetic construct
GGRGRRRDPGAARAE

SEQ ID NO: 14085 - protein, 15 aa, synthetic construct
GGRGRSGGGGGGDGD

SEQ ID NO: 14086 - protein, 15 aa, synthetic construct
GGRGSRERPRIGAPA

SEQ ID NO: 14087 - protein, 15 aa, synthetic construct
GGRHHRPDAPLRRGA

SEQ ID NO: 14088 - protein, 15 aa, synthetic construct
GGRHQGQQQEGVGGA

SEQ ID NO: 14089 - protein, 15 aa, synthetic construct
GGRIRARDRPRSSGW

SEQ ID NO: 14090 - protein, 15 aa, synthetic construct
GGRLRLRPLEQQWAT

SEQ ID NO: 14091 - protein, 15 aa, synthetic construct
GGRNESGGLAGSWSR

SEQ ID NO: 14092 - protein, 15 aa, synthetic construct
GGRPVGYPGAGGGPR

SEQ ID NO: 14093 - protein, 15 aa, synthetic construct
GGRQDRCTPGEAEAQ

SEQ ID NO: 14094 - protein, 15 aa, synthetic construct
GGRQGPGGWTSVASC

SEQ ID NO: 14095 - protein, 15 aa, synthetic construct
GGRRAAAAPADPAAP

SEQ ID NO: 14096 - protein, 15 aa, synthetic construct
GGRRAAGRGGAGRMG

SEQ ID NO: 14097 - protein, 15 aa, synthetic construct
GGRRAARAQAAEAVA

SEQ ID NO: 14098 - protein, 15 aa, synthetic construct
GGRRAPRAARAPGRG

SEQ ID NO: 14099 - protein, 15 aa, synthetic construct
GGRRAPRGPPGGSRH

SEQ ID NO: 14100 - protein, 15 aa, synthetic construct
GGRRENFAGTAGKGQ

SEQ ID NO: 14101 - protein, 15 aa, synthetic construct
GGRREPAFHPDLCPG

SEQ ID NO: 14102 - protein, 15 aa, synthetic construct
GGRRGAPGASSRRPR

SEQ ID NO: 14103 - protein, 15 aa, synthetic construct
GGRRGEGARSETKAS

SEQ ID NO: 14104 - protein, 15 aa, synthetic construct
GGRRGRSPARGRGGG

SEQ ID NO: 14105 - protein, 15 aa, synthetic construct
GGRRGSGEAGSVGAA

SEQ ID NO: 14106 - protein, 15 aa, synthetic construct
GGRRPGAGHGRAAAP

SEQ ID NO: 14107 - protein, 15 aa, synthetic construct
GGRRPPPRSPGAAAL

SEQ ID NO: 14108 - protein, 15 aa, synthetic construct
GGRRRDPMGPGAAAH

SEQ ID NO: 14109 - protein, 15 aa, synthetic construct
GGRRRGRDPGALRDV

SEQ ID NO: 14110 - protein, 15 aa, synthetic construct
GGRRRQRRRRQAGSK

SEQ ID NO: 14111 - protein, 15 aa, synthetic construct
GGRRRRGRRRWRPRR

SEQ ID NO: 14112 - protein, 15 aa, synthetic construct
GGRRRRRGNWRGGRR

SEQ ID NO: 14113 - protein, 15 aa, synthetic construct
GGRRRRRTESGPGRA

SEQ ID NO: 14114 - protein, 15 aa, synthetic construct
GGRSEAGAAGPSRCA

SEQ ID NO: 14115 - protein, 15 aa, synthetic construct
GGRSGPLCQEDGQDG

SEQ ID NO: 14116 - protein, 12 aa, synthetic construct
GGRSLGERASAA

SEQ ID NO: 14117 - protein, 15 aa, synthetic construct
GGRSSSRLQGARSGG

SEQ ID NO: 14118 - protein, 15 aa, synthetic construct
GGRSSSTRQEEARIG

SEQ ID NO: 14119 - protein, 15 aa, synthetic construct
GGRTGPAGVGEGGGP

SEQ ID NO: 14120 - protein, 15 aa, synthetic construct
GGRTQPAVRCPGAPA

SEQ ID NO: 14121 - protein, 15 aa, synthetic construct
GGRTRLYSEWREDSR

SEQ ID NO: 14122 - protein, 15 aa, synthetic construct
GGSAAGLLAPGQLQG

SEQ ID NO: 14123 - protein, 15 aa, synthetic construct
GGSAGEEDVWPAHGG

SEQ ID NO: 14124 - protein, 15 aa, synthetic construct
GGSAPSPDGREVRGG

SEQ ID NO: 14125 - protein, 15 aa, synthetic construct
GGSDDSRGSARGLRG

SEQ ID NO: 14126 - protein, 15 aa, synthetic construct
GGSDGAPLPAPAGVG

SEQ ID NO: 14127 - protein, 15 aa, synthetic construct
GGSDGCGYPERHQQR

SEQ ID NO: 14128 - protein, 15 aa, synthetic construct
GGSDGGGPAARSPPA

SEQ ID NO: 14129 - protein, 15 aa, synthetic construct
GGSDGRPGSWEPAAW

SEQ ID NO: 14130 - protein, 15 aa, synthetic construct
GGSDRCSEGLAAKPW

SEQ ID NO: 14131 - protein, 15 aa, synthetic construct
GGSEDKRGAGTPRQS

SEQ ID NO: 14132 - protein, 15 aa, synthetic construct
GGSEFPMPGDGPVSA

SEQ ID NO: 14133 - protein, 15 aa, synthetic construct
GGSERAAGPLPHGRP

SEQ ID NO: 14134 - protein, 13 aa, synthetic construct
GGSGDRGGSCSPR

SEQ ID NO: 14135 - protein, 15 aa, synthetic construct
GGSGGDCSSEGEWGR

SEQ ID NO: 14136 - protein, 15 aa, synthetic construct
GGSGGGGSGGRLAAP

SEQ ID NO: 14137 - protein, 15 aa, synthetic construct
GGSGGPDLRAGPRKE

SEQ ID NO: 14138 - protein, 15 aa, synthetic construct
GGSGGRRRSAGNSEI

SEQ ID NO: 14139 - protein, 15 aa, synthetic construct
GGSGGRVLQPAAQDK

SEQ ID NO: 14140 - protein, 15 aa, synthetic construct
GGSGLQPGQAGDQPL

SEQ ID NO: 14141 - protein, 15 aa, synthetic construct
GGSGWGRGEPPGCRA

SEQ ID NO: 14142 - protein, 15 aa, synthetic construct
GGSHSSGGGRRIQAE

SEQ ID NO: 14143 - protein, 15 aa, synthetic construct
GGSLGPGAGGGCDSA

SEQ ID NO: 14144 - protein, 15 aa, synthetic construct
GGSPSSPETPPSQQT

SEQ ID NO: 14145 - protein, 15 aa, synthetic construct
GGSRARRDGGDPAGE

SEQ ID NO: 14146 - protein, 15 aa, synthetic construct
GGSRGDVFSLHLPLA

SEQ ID NO: 14147 - protein, 15 aa, synthetic construct
GGSRPAKSVGAAVGA

SEQ ID NO: 14148 - protein, 15 aa, synthetic construct
GGSRRSRLHPAAGVA

SEQ ID NO: 14149 - protein, 15 aa, synthetic construct
GGSSAAFQGRVSEAL

SEQ ID NO: 14150 - protein, 15 aa, synthetic construct
GGSSGPGGPGDRDPA

SEQ ID NO: 14151 - protein, 15 aa, synthetic construct
GGSSGRAPAGPRGRG

SEQ ID NO: 14152 - protein, 15 aa, synthetic construct
GGSVREVGAAQSSCF

SEQ ID NO: 14153 - protein, 15 aa, synthetic construct
GGSWSRSSGVQGAGG

SEQ ID NO: 14154 - protein, 15 aa, synthetic construct
GGTAAALHHGLAAPG

SEQ ID NO: 14155 - protein, 15 aa, synthetic construct
GGTAGARRLASQEAQ

SEQ ID NO: 14156 - protein, 15 aa, synthetic construct
GGTAGATAERPGPRH

SEQ ID NO: 14157 - protein, 15 aa, synthetic construct
GGTATGALTGGHRLP

SEQ ID NO: 14158 - protein, 15 aa, synthetic construct
GGTEPTPEAPGHRGH

SEQ ID NO: 14159 - protein, 15 aa, synthetic construct
GGTFPGPDPGPGCAA

SEQ ID NO: 14160 - protein, 14 aa, synthetic construct
GGTGEAAARRALPR

SEQ ID NO: 14161 - protein, 15 aa, synthetic construct
GGTGELGSGGRPRPL

SEQ ID NO: 14162 - protein, 15 aa, synthetic construct
GGTGGSGAAGDSPGL

SEQ ID NO: 14163 - protein, 15 aa, synthetic construct
GGTGRHSQLQLGDLA

SEQ ID NO: 14164 - protein, 15 aa, synthetic construct
GGTGSCCGGCGGDFR

SEQ ID NO: 14165 - protein, 15 aa, synthetic construct
GGTILSRVPARLCSG

SEQ ID NO: 14166 - protein, 15 aa, synthetic construct
GGTRVAGVPGLGAAH

SEQ ID NO: 14167 - protein, 15 aa, synthetic construct
GGTRVEAADHTAGCR

SEQ ID NO: 14168 - protein, 15 aa, synthetic construct
GGVDAGHQSGAGGAA

SEQ ID NO: 14169 - protein, 15 aa, synthetic construct
GGVDEEGAPAAAVRR

SEQ ID NO: 14170 - protein, 13 aa, synthetic construct
GGVGEPAQENGVQ

SEQ ID NO: 14171 - protein, 15 aa, synthetic construct
GGVKGEAGHASAGGL

SEQ ID NO: 14172 - protein, 15 aa, synthetic construct
GGVLGRDSTAGRCRT

SEQ ID NO: 14173 - protein, 15 aa, synthetic construct
GGVRAAAASGDHGGP

SEQ ID NO: 14174 - protein, 15 aa, synthetic construct
GGVRATGTQPTRCGG

SEQ ID NO: 14175 - protein, 15 aa, synthetic construct
GGVRERYGPENLGTG

SEQ ID NO: 14176 - protein, 15 aa, synthetic construct
GGVRLDYSHRALFGS

SEQ ID NO: 14177 - protein, 15 aa, synthetic construct
GGVVEVSAPLPVQTG

SEQ ID NO: 14178 - protein, 15 aa, synthetic construct
GGVWGGAEGRLLQTR

SEQ ID NO: 14179 - protein, 15 aa, synthetic construct
GGWAEAGFGPVAGKA

SEQ ID NO: 14180 - protein, 15 aa, synthetic construct
GGWQEQAPYERRQKG

SEQ ID NO: 14181 - protein, 15 aa, synthetic construct
GGYHRKTPGGRDPKT

SEQ ID NO: 14182 - protein, 12 aa, synthetic construct
GGYSDYSIGGGG

SEQ ID NO: 14183 - protein, 15 aa, synthetic construct
GGYSPPPEETMPFEL

SEQ ID NO: 14184 - protein, 15 aa, synthetic construct
GHAAPASGGAAALTG

SEQ ID NO: 14185 - protein, 15 aa, synthetic construct
GHAESPRRQTAGCAG

SEQ ID NO: 14186 - protein, 15 aa, synthetic construct
GHAGLPGAVLGRHGP

SEQ ID NO: 14187 - protein, 12 aa, synthetic construct
GHAQGPARGPSQ

SEQ ID NO: 14188 - protein, 15 aa, synthetic construct
GHASAARPAPAPPPA

SEQ ID NO: 14189 - protein, 15 aa, synthetic construct
GHDWAGESESGGPRS

SEQ ID NO: 14190 - protein, 12 aa, synthetic construct
GHEAPVESASLG

SEQ ID NO: 14191 - protein, 15 aa, synthetic construct
GHEEEDPPGAEEPDP

SEQ ID NO: 14192 - protein, 15 aa, synthetic construct
GHEIREAPLAAAASS

SEQ ID NO: 14193 - protein, 15 aa, synthetic construct
GHETLLPLPAPEEEN

SEQ ID NO: 14194 - protein, 15 aa, synthetic construct
GHFRVGGGGGAGDNQ

SEQ ID NO: 14195 - protein, 15 aa, synthetic construct
GHGGGDGSAEAEQAG

SEQ ID NO: 14196 - protein, 15 aa, synthetic construct
GHGGQHGDGVHAGAE

SEQ ID NO: 14197 - protein, 15 aa, synthetic construct
GHGQGQPHSGSRGDG

SEQ ID NO: 14198 - protein, 15 aa, synthetic construct
GHGQHGGRRLLPEAV

SEQ ID NO: 14199 - protein, 15 aa, synthetic construct
GHGRAGHQAEPAAAD

SEQ ID NO: 14200 - protein, 15 aa, synthetic construct
GHGRAHPPGGAEAAS

SEQ ID NO: 14201 - protein, 15 aa, synthetic construct
GHGVCQRLRPAQVRR

SEQ ID NO: 14202 - protein, 15 aa, synthetic construct
GHGVPGHRAAPVPAT

SEQ ID NO: 14203 - protein, 15 aa, synthetic construct
GHHALQCLCDCHSVP

SEQ ID NO: 14204 - protein, 15 aa, synthetic construct
GHHGEQGDLRPGPGV

SEQ ID NO: 14205 - protein, 15 aa, synthetic construct
GHHQHHGLHPAAAPQ

SEQ ID NO: 14206 - protein, 15 aa, synthetic construct
GHHQQEPPGTPERGA

SEQ ID NO: 14207 - protein, 15 aa, synthetic construct
GHHQVQQVGRQLRGG

SEQ ID NO: 14208 - protein, 15 aa, synthetic construct
GHLAGFTVRAPGEDR

SEQ ID NO: 14209 - protein, 15 aa, synthetic construct
GHLPPSGEAGGLQSP

SEQ ID NO: 14210 - protein, 15 aa, synthetic construct
GHLPRIGPNGQKCSC

SEQ ID NO: 14211 - protein, 15 aa, synthetic construct
GHNEVTPLHFCRSSG

SEQ ID NO: 14212 - protein, 15 aa, synthetic construct
GHPADQGQPGGESQP

SEQ ID NO: 14213 - protein, 15 aa, synthetic construct
GHPAQEKLPVFLSQL

SEQ ID NO: 14214 - protein, 15 aa, synthetic construct
GHPDSQPSYHPHSAP

SEQ ID NO: 14215 - protein, 13 aa, synthetic construct
GHPEREEELRAGG

SEQ ID NO: 14216 - protein, 15 aa, synthetic construct
GHPGLPLSSQLLDLD

SEQ ID NO: 14217 - protein, 15 aa, synthetic construct
GHPGPTPAAAGAASY

SEQ ID NO: 14218 - protein, 15 aa, synthetic construct
GHQDRQRGLPGGVQP

SEQ ID NO: 14219 - protein, 15 aa, synthetic construct
GHQGSGHAPSYVGAA

SEQ ID NO: 14220 - protein, 15 aa, synthetic construct
GHQHLRAALRDAAED

SEQ ID NO: 14221 - protein, 15 aa, synthetic construct
GHQLAEPEPRRAAPA

SEQ ID NO: 14222 - protein, 15 aa, synthetic construct
GHQPTAAAASSGAAA

SEQ ID NO: 14223 - protein, 15 aa, synthetic construct
GHQQGPPRHAGRPPH

SEQ ID NO: 14224 - protein, 15 aa, synthetic construct
GHQRPVRQLQEGGCG

SEQ ID NO: 14225 - protein, 15 aa, synthetic construct
GHRAGEGCCAEPLGS

SEQ ID NO: 14226 - protein, 14 aa, synthetic construct
GHRDGSDGGGAGGA

SEQ ID NO: 14227 - protein, 15 aa, synthetic construct
GHRDPRAQPAAAGGA

SEQ ID NO: 14228 - protein, 15 aa, synthetic construct
GHRGGDLRSAGGATL

SEQ ID NO: 14229 - protein, 15 aa, synthetic construct
GHRGGRAGGAGRAAA

SEQ ID NO: 14230 - protein, 15 aa, synthetic construct
GHRPAGPARAGPGPG

SEQ ID NO: 14231 - protein, 15 aa, synthetic construct
GHRPAVAGAPEVRHQ

SEQ ID NO: 14232 - protein, 15 aa, synthetic construct
GHRQCGPGDREPRPG

SEQ ID NO: 14233 - protein, 15 aa, synthetic construct
GHRRRRGGREETGAA

SEQ ID NO: 14234 - protein, 15 aa, synthetic construct
GHRRSHAAVLGDPGL

SEQ ID NO: 14235 - protein, 15 aa, synthetic construct
GHRRVRLPLTFNQGN

SEQ ID NO: 14236 - protein, 15 aa, synthetic construct
GHRVRQRLRPDEVRG

SEQ ID NO: 14237 - protein, 15 aa, synthetic construct
GHSAPSQRSEAKRQK

SEQ ID NO: 14238 - protein, 15 aa, synthetic construct
GHSEIRDPSEAAAGG

SEQ ID NO: 14239 - protein, 15 aa, synthetic construct
GHSPPRDGPARREHM

SEQ ID NO: 14240 - protein, 15 aa, synthetic construct
GHSVRQQVHPADEAP

SEQ ID NO: 14241 - protein, 15 aa, synthetic construct
GHVQVATHEGFDERE

SEQ ID NO: 14242 - protein, 15 aa, synthetic construct
GIAGGPSAGPLANRR

SEQ ID NO: 14243 - protein, 15 aa, synthetic construct
GIALCFNDGPGGAQL

SEQ ID NO: 14244 - protein, 15 aa, synthetic construct
GIALDRPGRDLGSPR

SEQ ID NO: 14245 - protein, 15 aa, synthetic construct
GICHGSCPQDATSVI

SEQ ID NO: 14246 - protein, 15 aa, synthetic construct
GIEENGDQTCDNLSQ

SEQ ID NO: 14247 - protein, 15 aa, synthetic construct
GIFKGTVEREAFSPH

SEQ ID NO: 14248 - protein, 15 aa, synthetic construct
GIFPERKSGIPAPAA

SEQ ID NO: 14249 - protein, 15 aa, synthetic construct
GIFWTFEPPGAIRPL

SEQ ID NO: 14250 - protein, 15 aa, synthetic construct
GIGQGGREGPAHESQ

SEQ ID NO: 14251 - protein, 15 aa, synthetic construct
GIHRQPKRLPGKAPA

SEQ ID NO: 14252 - protein, 15 aa, synthetic construct
GIKAIFVHPSGSREA

SEQ ID NO: 14253 - protein, 15 aa, synthetic construct
GILAANARATCPGPA

SEQ ID NO: 14254 - protein, 15 aa, synthetic construct
GILNYTNYLLCDYSC

SEQ ID NO: 14255 - protein, 15 aa, synthetic construct
GILRFSQDHKSALHY

SEQ ID NO: 14256 - protein, 15 aa, synthetic construct
GILSLANCWAGSWVP

SEQ ID NO: 14257 - protein, 15 aa, synthetic construct
GIPGAVPWLEEDLAW

SEQ ID NO: 14258 - protein, 15 aa, synthetic construct
GIQGGQFLPSALLPL

SEQ ID NO: 14259 - protein, 15 aa, synthetic construct
GIRAPLAGAAALLAA

SEQ ID NO: 14260 - protein, 15 aa, synthetic construct
GIRGLRGRGRGAGPG

SEQ ID NO: 14261 - protein, 15 aa, synthetic construct
GIRGTCGPGPGGGHQ

SEQ ID NO: 14262 - protein, 15 aa, synthetic construct
GIRGTPSSGRWGGGC

SEQ ID NO: 14263 - protein, 15 aa, synthetic construct
GIRKKQKDGKCLHSP

SEQ ID NO: 14264 - protein, 15 aa, synthetic construct
GIRKTKDFGPRKRGA

SEQ ID NO: 14265 - protein, 15 aa, synthetic construct
GIRNGNAERQGRGGL

SEQ ID NO: 14266 - protein, 15 aa, synthetic construct
GIRPRPPLGAQNLAS

SEQ ID NO: 14267 - protein, 15 aa, synthetic construct
GIRTGNEQLRPAHQS

SEQ ID NO: 14268 - protein, 15 aa, synthetic construct
GISMSHPLRPFTLES

SEQ ID NO: 14269 - protein, 15 aa, synthetic construct
GIVEQPGAAPAKTSP

SEQ ID NO: 14270 - protein, 15 aa, synthetic construct
GKACREPGRAWPRAP

SEQ ID NO: 14271 - protein, 15 aa, synthetic construct
GKAHFKHQWGEEEEP

SEQ ID NO: 14272 - protein, 15 aa, synthetic construct
GKAPGKSSQTGHWAA

SEQ ID NO: 14273 - protein, 15 aa, synthetic construct
GKATRSVRDAGPGAA

SEQ ID NO: 14274 - protein, 15 aa, synthetic construct
GKCSPGQKSGQPSHD

SEQ ID NO: 14275 - protein, 15 aa, synthetic construct
GKDQKHIAGCRGDRF

SEQ ID NO: 14276 - protein, 15 aa, synthetic construct
GKEGWSPGPPPLPLL

SEQ ID NO: 14277 - protein, 14 aa, synthetic construct
GKGAQLGRGGCSGL

SEQ ID NO: 14278 - protein, 15 aa, synthetic construct
GKGPRSQGPGGEAWP

SEQ ID NO: 14279 - protein, 15 aa, synthetic construct
GKGRRHGTANGKGRG

SEQ ID NO: 14280 - protein, 15 aa, synthetic construct
GKKDFPRSESWGVGG

SEQ ID NO: 14281 - protein, 15 aa, synthetic construct
GKKKSNSCQGIRPSG

SEQ ID NO: 14282 - protein, 15 aa, synthetic construct
GKLDGEGASGRAEKG

SEQ ID NO: 14283 - protein, 15 aa, synthetic construct
GKPCRWESPVSSRQS

SEQ ID NO: 14284 - protein, 15 aa, synthetic construct
GKPCSCSEEPPPGPH

SEQ ID NO: 14285 - protein, 15 aa, synthetic construct
GKPGIKAQECPLFSL

SEQ ID NO: 14286 - protein, 15 aa, synthetic construct
GKQDAAQEGPPTPSA

SEQ ID NO: 14287 - protein, 15 aa, synthetic construct
GKQGLAGPEATGGGD

SEQ ID NO: 14288 - protein, 15 aa, synthetic construct
GKQPHQRVDNERPSG

SEQ ID NO: 14289 - protein, 15 aa, synthetic construct
GKQRHEWIPSQEMLS

SEQ ID NO: 14290 - protein, 15 aa, synthetic construct
GKRAAAGRRGVRTPA

SEQ ID NO: 14291 - protein, 15 aa, synthetic construct
GKRAAARDRDRQEEA

SEQ ID NO: 14292 - protein, 14 aa, synthetic construct
GKREKPGPLESPAA

SEQ ID NO: 14293 - protein, 15 aa, synthetic construct
GKRGRHGKRGRHGKR

SEQ ID NO: 14294 - protein, 15 aa, synthetic construct
GKRGYGHQEEKRCFQ

SEQ ID NO: 14295 - protein, 15 aa, synthetic construct
GKRPQPPAGERAASG

SEQ ID NO: 14296 - protein, 15 aa, synthetic construct
GKRRGRHSADKASPA

SEQ ID NO: 14297 - protein, 15 aa, synthetic construct
GKSKPFSGIGIYFVG

SEQ ID NO: 14298 - protein, 15 aa, synthetic construct
GKSWRRRRLPSPAER

SEQ ID NO: 14299 - protein, 15 aa, synthetic construct
GKTSEVHRQDCDGTG

SEQ ID NO: 14300 - protein, 15 aa, synthetic construct
GKVCRRSRCCNSWCR

SEQ ID NO: 14301 - protein, 15 aa, synthetic construct
GKVNNKDVEAIEETE

SEQ ID NO: 14302 - protein, 15 aa, synthetic construct
GLAAGQAELGPLLAR

SEQ ID NO: 14303 - protein, 15 aa, synthetic construct
GLAAPEAGSDVRVRP

SEQ ID NO: 14304 - protein, 15 aa, synthetic construct
GLAEPAAGAAKDAPE

SEQ ID NO: 14305 - protein, 15 aa, synthetic construct
GLAGAPFLAPHPLLG

SEQ ID NO: 14306 - protein, 15 aa, synthetic construct
GLAGSGLTGSPSPGR

SEQ ID NO: 14307 - protein, 15 aa, synthetic construct
GLAHPPQDSLGAAGQ

SEQ ID NO: 14308 - protein, 15 aa, synthetic construct
GLALPGVGVDSGVGT

SEQ ID NO: 14309 - protein, 14 aa, synthetic construct
GLAPGGARRRPASP

SEQ ID NO: 14310 - protein, 15 aa, synthetic construct
GLAPVHPAAPAGHPG

SEQ ID NO: 14311 - protein, 15 aa, synthetic construct
GLAPVRGREPAAARR

SEQ ID NO: 14312 - protein, 15 aa, synthetic construct
GLARDAGCVSAGRSP

SEQ ID NO: 14313 - protein, 15 aa, synthetic construct
GLARGLPPGPLPPAR

SEQ ID NO: 14314 - protein, 15 aa, synthetic construct
GLASPTPTATAAAAV

SEQ ID NO: 14315 - protein, 15 aa, synthetic construct
GLCALAGAGSEAARS

SEQ ID NO: 14316 - protein, 15 aa, synthetic construct
GLCCLCCCCHPCSSP

SEQ ID NO: 14317 - protein, 15 aa, synthetic construct
GLCGEPEQVPAEAGH

SEQ ID NO: 14318 - protein, 15 aa, synthetic construct
GLDCAGPRGPGAAAV

SEQ ID NO: 14319 - protein, 15 aa, synthetic construct
GLDFLFTGGPSGAQL

SEQ ID NO: 14320 - protein, 15 aa, synthetic construct
GLDQVPAVPGRAHAC

SEQ ID NO: 14321 - protein, 15 aa, synthetic construct
GLEEGRAERAGGEMV

SEQ ID NO: 14322 - protein, 15 aa, synthetic construct
GLEFLQSSCNAVHFS

SEQ ID NO: 14323 - protein, 15 aa, synthetic construct
GLEFPCKSPARGATS

SEQ ID NO: 14324 - protein, 15 aa, synthetic construct
GLEHQPPLAAAAHLP

SEQ ID NO: 14325 - protein, 15 aa, synthetic construct
GLELAAEAPGAGHPA

SEQ ID NO: 14326 - protein, 15 aa, synthetic construct
GLELAFPATCLAGRG

SEQ ID NO: 14327 - protein, 15 aa, synthetic construct
GLESTVDLAMGVELE

SEQ ID NO: 14328 - protein, 15 aa, synthetic construct
GLFLGCCRRGPDPQP

SEQ ID NO: 14329 - protein, 15 aa, synthetic construct
GLGAAGIGAGARPPP

SEQ ID NO: 14330 - protein, 15 aa, synthetic construct
GLGAAGLQAVRRGPR

SEQ ID NO: 14331 - protein, 15 aa, synthetic construct
GLGAAPGVHVRAAGP

SEQ ID NO: 14332 - protein, 15 aa, synthetic construct
GLGAELCLQVQVLRD

SEQ ID NO: 14333 - protein, 15 aa, synthetic construct
GLGAGGRLQADESTE

SEQ ID NO: 14334 - protein, 15 aa, synthetic construct
GLGAQDGRGDRVRAG

SEQ ID NO: 14335 - protein, 15 aa, synthetic construct
GLGDALRGVHPPLRL

SEQ ID NO: 14336 - protein, 15 aa, synthetic construct
GLGEAAGGSHLYSAG

SEQ ID NO: 14337 - protein, 15 aa, synthetic construct
GLGEPGPRAACCLRP

SEQ ID NO: 14338 - protein, 15 aa, synthetic construct
GLGEPLLLPGTFGPA

SEQ ID NO: 14339 - protein, 15 aa, synthetic construct
GLGESGRLHPEIGPQ

SEQ ID NO: 14340 - protein, 15 aa, synthetic construct
GLGESQHHHRVPPPW

SEQ ID NO: 14341 - protein, 15 aa, synthetic construct
GLGESVCGAQDLLQR

SEQ ID NO: 14342 - protein, 15 aa, synthetic construct
GLGFGNTFIPEAGTK

SEQ ID NO: 14343 - protein, 15 aa, synthetic construct
GLGGAVPAAVAAAAH

SEQ ID NO: 14344 - protein, 15 aa, synthetic construct
GLGGGAQFGVAGNSG

SEQ ID NO: 14345 - protein, 15 aa, synthetic construct
GLGGLAAGPSWDARG

SEQ ID NO: 14346 - protein, 15 aa, synthetic construct
GLGGQVLAGLEPAGQ

SEQ ID NO: 14347 - protein, 15 aa, synthetic construct
GLGGVVPAARLQAPA

SEQ ID NO: 14348 - protein, 15 aa, synthetic construct
GLGLRAQRGEREQAA

SEQ ID NO: 14349 - protein, 15 aa, synthetic construct
GLGLRGAGPGGRPGQ

SEQ ID NO: 14350 - protein, 15 aa, synthetic construct
GLGPEGLGQLPRRRS

SEQ ID NO: 14351 - protein, 15 aa, synthetic construct
GLGPERAGEGVAAAA

SEQ ID NO: 14352 - protein, 15 aa, synthetic construct
GLGPRPAAGPGLGEA

SEQ ID NO: 14353 - protein, 15 aa, synthetic construct
GLGRAGLHHRDPGSA

SEQ ID NO: 14354 - protein, 15 aa, synthetic construct
GLGRDEQTEEKEKCP

SEQ ID NO: 14355 - protein, 15 aa, synthetic construct
GLGRGGEAAGGPGGD

SEQ ID NO: 14356 - protein, 15 aa, synthetic construct
GLGRSAPAAAVELRG

SEQ ID NO: 14357 - protein, 15 aa, synthetic construct
GLGSCGELRDQATGP

SEQ ID NO: 14358 - protein, 13 aa, synthetic construct
GLGSEAASGRRSD

SEQ ID NO: 14359 - protein, 15 aa, synthetic construct
GLGSLGHGPPAASPF

SEQ ID NO: 14360 - protein, 15 aa, synthetic construct
GLGTAEDPQGCHQGR

SEQ ID NO: 14361 - protein, 15 aa, synthetic construct
GLGTAEDPQGGHQGR

SEQ ID NO: 14362 - protein, 15 aa, synthetic construct
GLGTIPEEILSSTWN

SEQ ID NO: 14363 - protein, 15 aa, synthetic construct
GLGVAAPAATDGARR

SEQ ID NO: 14364 - protein, 15 aa, synthetic construct
GLHAERRGQGGGGAE

SEQ ID NO: 14365 - protein, 15 aa, synthetic construct
GLHGATGNGHRAGRP

SEQ ID NO: 14366 - protein, 15 aa, synthetic construct
GLHGEAASRQGAAGR

SEQ ID NO: 14367 - protein, 15 aa, synthetic construct
GLHPAKEEVLPSGRT

SEQ ID NO: 14368 - protein, 15 aa, synthetic construct
GLHPHSPDSTSPGLS

SEQ ID NO: 14369 - protein, 15 aa, synthetic construct
GLHPRLQPRQPAELP

SEQ ID NO: 14370 - protein, 15 aa, synthetic construct
GLHRVDQPPSSMCVS

SEQ ID NO: 14371 - protein, 15 aa, synthetic construct
GLLDEWPGSLRGLCI

SEQ ID NO: 14372 - protein, 15 aa, synthetic construct
GLLGAGQAARAGGGD

SEQ ID NO: 14373 - protein, 15 aa, synthetic construct
GLLGETPTAHWGCLE

SEQ ID NO: 14374 - protein, 15 aa, synthetic construct
GLLPGQSEEPGDREP

SEQ ID NO: 14375 - protein, 15 aa, synthetic construct
GLLQPGGGSAGEPEA

SEQ ID NO: 14376 - protein, 15 aa, synthetic construct
GLLQQRPQQGRRQQQ

SEQ ID NO: 14377 - protein, 15 aa, synthetic construct
GLLRGGGQMEPVLLR

SEQ ID NO: 14378 - protein, 15 aa, synthetic construct
GLLRQSALGCRGAGR

SEQ ID NO: 14379 - protein, 15 aa, synthetic construct
GLLSSSQVPTSRARE

SEQ ID NO: 14380 - protein, 15 aa, synthetic construct
GLMSFNRMELMFPMS

SEQ ID NO: 14381 - protein, 15 aa, synthetic construct
GLPAAGRGQRELERD

SEQ ID NO: 14382 - protein, 15 aa, synthetic construct
GLPAQTQEHAQTLLR

SEQ ID NO: 14383 - protein, 15 aa, synthetic construct
GLPARAGQVQRRALG

SEQ ID NO: 14384 - protein, 15 aa, synthetic construct
GLPARTHHRHHPGCL

SEQ ID NO: 14385 - protein, 15 aa, synthetic construct
GLPASAVHGPGVPSL

SEQ ID NO: 14386 - protein, 15 aa, synthetic construct
GLPDDVHREEWAPSA

SEQ ID NO: 14387 - protein, 15 aa, synthetic construct
GLPDQAVDPRERPGH

SEQ ID NO: 14388 - protein, 15 aa, synthetic construct
GLPGGGAQGTPACSS

SEQ ID NO: 14389 - protein, 15 aa, synthetic construct
GLPGHSPLGDGPLQG

SEQ ID NO: 14390 - protein, 15 aa, synthetic construct
GLPGPQAPLPSAWAS

SEQ ID NO: 14391 - protein, 15 aa, synthetic construct
GLPGPQDTGPEQVTR

SEQ ID NO: 14392 - protein, 15 aa, synthetic construct
GLPGRVSVASGPGSH

SEQ ID NO: 14393 - protein, 15 aa, synthetic construct
GLPQQQTVPLFSMCS

SEQ ID NO: 14394 - protein, 15 aa, synthetic construct
GLPVCGSGNDLITDR

SEQ ID NO: 14395 - protein, 15 aa, synthetic construct
GLPVQLRGGGPAVRE

SEQ ID NO: 14396 - protein, 15 aa, synthetic construct
GLPWISAAQGSAEPG

SEQ ID NO: 14397 - protein, 13 aa, synthetic construct
GLQDSLRSLHLNC

SEQ ID NO: 14398 - protein, 15 aa, synthetic construct
GLQGAVIKESGQVGV

SEQ ID NO: 14399 - protein, 15 aa, synthetic construct
GLQGRRERCVCRGCA

SEQ ID NO: 14400 - protein, 15 aa, synthetic construct
GLQHEEAGVGRGHLL

SEQ ID NO: 14401 - protein, 13 aa, synthetic construct
GLQMPQVRQDRVL

SEQ ID NO: 14402 - protein, 12 aa, synthetic construct
GLQPRADARAQI

SEQ ID NO: 14403 - protein, 15 aa, synthetic construct
GLQPVSPSASPCASP

SEQ ID NO: 14404 - protein, 15 aa, synthetic construct
GLQRCRGAGGAGGRG

SEQ ID NO: 14405 - protein, 15 aa, synthetic construct
GLQRGPPILQEQSRR

SEQ ID NO: 14406 - protein, 12 aa, synthetic construct
GLQRLPGSLSEP

SEQ ID NO: 14407 - protein, 15 aa, synthetic construct
GLQTNQKERGASYQL

SEQ ID NO: 14408 - protein, 15 aa, synthetic construct
GLQTQQAEQLQTPEK

SEQ ID NO: 14409 - protein, 15 aa, synthetic construct
GLRDGGLWGPDEGPS

SEQ ID NO: 14410 - protein, 15 aa, synthetic construct
GLRETDTAFALEELD

SEQ ID NO: 14411 - protein, 15 aa, synthetic construct
GLRGAAGWSHCHHAH

SEQ ID NO: 14412 - protein, 15 aa, synthetic construct
GLRGGAAPTAGLGAP

SEQ ID NO: 14413 - protein, 15 aa, synthetic construct
GLRGPGARAGAGRGG

SEQ ID NO: 14414 - protein, 15 aa, synthetic construct
GLRGPSWTPKGSTSV

SEQ ID NO: 14415 - protein, 15 aa, synthetic construct
GLRLPAGHAAAGPWT

SEQ ID NO: 14416 - protein, 15 aa, synthetic construct
GLRLQHWQDRLVPGR

SEQ ID NO: 14417 - protein, 15 aa, synthetic construct
GLRQPGRDAAAAGRA

SEQ ID NO: 14418 - protein, 15 aa, synthetic construct
GLRQSVQEVFRQSLL

SEQ ID NO: 14419 - protein, 15 aa, synthetic construct
GLRRGQGSGGGRPNG

SEQ ID NO: 14420 - protein, 15 aa, synthetic construct
GLRRLPPGSLAGARA

SEQ ID NO: 14421 - protein, 15 aa, synthetic construct
GLRRPGERGLAAPAT

SEQ ID NO: 14422 - protein, 15 aa, synthetic construct
GLRRPGPARRALPGA

SEQ ID NO: 14423 - protein, 15 aa, synthetic construct
GLRRPRVGAAPPQPA

SEQ ID NO: 14424 - protein, 15 aa, synthetic construct
GLRSLGPGPAAGARA

SEQ ID NO: 14425 - protein, 15 aa, synthetic construct
GLRTGGDPGGAPSAR

SEQ ID NO: 14426 - protein, 15 aa, synthetic construct
GLRVPELLGAPGQLP

SEQ ID NO: 14427 - protein, 15 aa, synthetic construct
GLSAAASAEPGRLPP

SEQ ID NO: 14428 - protein, 15 aa, synthetic construct
GLSDHLEGGGLREKR

SEQ ID NO: 14429 - protein, 15 aa, synthetic construct
GLSEETPAGLQKPLQ

SEQ ID NO: 14430 - protein, 15 aa, synthetic construct
GLSGPDTVRSFLPGS

SEQ ID NO: 14431 - protein, 15 aa, synthetic construct
GLSLEQRRGEAAAAG

SEQ ID NO: 14432 - protein, 15 aa, synthetic construct
GLSPGEPVQLSSGTA

SEQ ID NO: 14433 - protein, 15 aa, synthetic construct
GLSQAAGDPPQGPAQ

SEQ ID NO: 14434 - protein, 15 aa, synthetic construct
GLSRPLDHVPRPAAT

SEQ ID NO: 14435 - protein, 15 aa, synthetic construct
GLSRTGRRLRHWPLP

SEQ ID NO: 14436 - protein, 15 aa, synthetic construct
GLSSPGRRSRQAGVR

SEQ ID NO: 14437 - protein, 13 aa, synthetic construct
GLVAEGGSGSEAQ

SEQ ID NO: 14438 - protein, 15 aa, synthetic construct
GLVLGVATEDGAERG

SEQ ID NO: 14439 - protein, 15 aa, synthetic construct
GLVRDRSFGTLREAG

SEQ ID NO: 14440 - protein, 15 aa, synthetic construct
GLVSGEKRAEISRLD

SEQ ID NO: 14441 - protein, 15 aa, synthetic construct
GLVYPGIPEALRRMS

SEQ ID NO: 14442 - protein, 15 aa, synthetic construct
GLWERVRGLRGLESG

SEQ ID NO: 14443 - protein, 15 aa, synthetic construct
GMAQTARTLAAALHL

SEQ ID NO: 14444 - protein, 15 aa, synthetic construct
GMARGDEEASGAVGL

SEQ ID NO: 14445 - protein, 15 aa, synthetic construct
GMDRRHRQHCPAPVE

SEQ ID NO: 14446 - protein, 15 aa, synthetic construct
GMLSQSNAAAGHRGR

SEQ ID NO: 14447 - protein, 14 aa, synthetic construct
GMQRPPAQLETYLA

SEQ ID NO: 14448 - protein, 15 aa, synthetic construct
GMQSVQPAEARGAVQ

SEQ ID NO: 14449 - protein, 15 aa, synthetic construct
GMVEAGATPPLPPCE

SEQ ID NO: 14450 - protein, 15 aa, synthetic construct
GMVPGPAAQDGPGKP

SEQ ID NO: 14451 - protein, 13 aa, synthetic construct
GNAVSGVRKSNSN

SEQ ID NO: 14452 - protein, 15 aa, synthetic construct
GNAYVADTRGSGGLL

SEQ ID NO: 14453 - protein, 15 aa, synthetic construct
GNDARPEDGGRMGRR

SEQ ID NO: 14454 - protein, 15 aa, synthetic construct
GNDLRAQWQEILNRV

SEQ ID NO: 14455 - protein, 15 aa, synthetic construct
GNETDAAHLLWPHAT

SEQ ID NO: 14456 - protein, 15 aa, synthetic construct
GNGERRQPGFRKPES

SEQ ID NO: 14457 - protein, 15 aa, synthetic construct
GNGLGMGRLAGRWPG

SEQ ID NO: 14458 - protein, 15 aa, synthetic construct
GNGQLRQDPDRDLRG

SEQ ID NO: 14459 - protein, 15 aa, synthetic construct
GNICPTCRKPSGGDN

SEQ ID NO: 14460 - protein, 15 aa, synthetic construct
GNPADQLPSLQGGLG

SEQ ID NO: 14461 - protein, 15 aa, synthetic construct
GNPASGQQKAGGSRA

SEQ ID NO: 14462 - protein, 15 aa, synthetic construct
GNPEAAPGSRDTTGR

SEQ ID NO: 14463 - protein, 15 aa, synthetic construct
GNPLSPSLHTAHQME

SEQ ID NO: 14464 - protein, 15 aa, synthetic construct
GNPPGDSVGDRMHPD

SEQ ID NO: 14465 - protein, 15 aa, synthetic construct
GNPRGPAENESPRSG

SEQ ID NO: 14466 - protein, 15 aa, synthetic construct
GNQANRACHDPQPSE

SEQ ID NO: 14467 - protein, 15 aa, synthetic construct
GNQEKPNLVPRLAEC

SEQ ID NO: 14468 - protein, 15 aa, synthetic construct
GNQQPAAPAAQLQPG

SEQ ID NO: 14469 - protein, 15 aa, synthetic construct
GNRAAKSVLARAPTL

SEQ ID NO: 14470 - protein, 15 aa, synthetic construct
GNRATIPPPGRGAGP

SEQ ID NO: 14471 - protein, 15 aa, synthetic construct
GNRCACARQSEGVCA

SEQ ID NO: 14472 - protein, 15 aa, synthetic construct
GNREPHVGIRLCLPG

SEQ ID NO: 14473 - protein, 15 aa, synthetic construct
GNRKSNTCPRISPPG

SEQ ID NO: 14474 - protein, 15 aa, synthetic construct
GNRSCCRPVQMAHSD

SEQ ID NO: 14475 - protein, 15 aa, synthetic construct
GNSGVPSRRQLVSFP

SEQ ID NO: 14476 - protein, 15 aa, synthetic construct
GNSPGRSSPAVSGGG

SEQ ID NO: 14477 - protein, 15 aa, synthetic construct
GNTEPHSGDRIHSSW

SEQ ID NO: 14478 - protein, 15 aa, synthetic construct
GNYFIKTIHFIDFSH

SEQ ID NO: 14479 - protein, 15 aa, synthetic construct
GNYIDLVSGLGSYQV

SEQ ID NO: 14480 - protein, 15 aa, synthetic construct
GPAAAAGEGGLALGG

SEQ ID NO: 14481 - protein, 12 aa, synthetic construct
GPAAEDSGAQSR

SEQ ID NO: 14482 - protein, 15 aa, synthetic construct
GPAAFPGSPRAEPGA

SEQ ID NO: 14483 - protein, 15 aa, synthetic construct
GPAAGALQNPHATAC

SEQ ID NO: 14484 - protein, 15 aa, synthetic construct
GPAAGCGRGRPGGPP

SEQ ID NO: 14485 - protein, 15 aa, synthetic construct
GPAALPLHGLGQPSL

SEQ ID NO: 14486 - protein, 15 aa, synthetic construct
GPAARPEGGAAGGRG

SEQ ID NO: 14487 - protein, 15 aa, synthetic construct
GPAEARAAGAAGAAC

SEQ ID NO: 14488 - protein, 15 aa, synthetic construct
GPAEARLPHGTAAAE

SEQ ID NO: 14489 - protein, 14 aa, synthetic construct
GPAETRFLPGRSWP

SEQ ID NO: 14490 - protein, 13 aa, synthetic construct
GPAGAAAAAASQV

SEQ ID NO: 14491 - protein, 15 aa, synthetic construct
GPAGCGTGVAAGLAG

SEQ ID NO: 14492 - protein, 15 aa, synthetic construct
GPAGGAYAVHHGRAE

SEQ ID NO: 14493 - protein, 15 aa, synthetic construct
GPAGGERSGQPGATA

SEQ ID NO: 14494 - protein, 15 aa, synthetic construct
GPAGGRGGRCAGRAR

SEQ ID NO: 14495 - protein, 15 aa, synthetic construct
GPAGPAGADGKWRQQ

SEQ ID NO: 14496 - protein, 15 aa, synthetic construct
GPAGRRPAAGTAVQR

SEQ ID NO: 14497 - protein, 15 aa, synthetic construct
GPAGSCKSYPSALHG

SEQ ID NO: 14498 - protein, 15 aa, synthetic construct
GPAGSGQCRPVCPAG

SEQ ID NO: 14499 - protein, 15 aa, synthetic construct
GPAGTEGGGLRPHCG

SEQ ID NO: 14500 - protein, 15 aa, synthetic construct
GPALLPAPRGGEAPA

SEQ ID NO: 14501 - protein, 15 aa, synthetic construct
GPANQAAGQPELGRF

SEQ ID NO: 14502 - protein, 15 aa, synthetic construct
GPARAARAADRAALR

SEQ ID NO: 14503 - protein, 15 aa, synthetic construct
GPARALREGGGGGCV

SEQ ID NO: 14504 - protein, 15 aa, synthetic construct
GPARASWRSPSGARA

SEQ ID NO: 14505 - protein, 15 aa, synthetic construct
GPARGPAAPLQAGAG

SEQ ID NO: 14506 - protein, 15 aa, synthetic construct
GPARGTAGAPGAAAR

SEQ ID NO: 14507 - protein, 15 aa, synthetic construct
GPARGVRGRAADGAA

SEQ ID NO: 14508 - protein, 15 aa, synthetic construct
GPARPAAAGLAGPGR

SEQ ID NO: 14509 - protein, 15 aa, synthetic construct
GPARPAAVRGEPGRR

SEQ ID NO: 14510 - protein, 15 aa, synthetic construct
GPARRGREPGTHGLS

SEQ ID NO: 14511 - protein, 14 aa, synthetic construct
GPARVRLQSDHPLS

SEQ ID NO: 14512 - protein, 13 aa, synthetic construct
GPASAAGQQLQPQ

SEQ ID NO: 14513 - protein, 15 aa, synthetic construct
GPASVYPATPDGYPG

SEQ ID NO: 14514 - protein, 15 aa, synthetic construct
GPATATAPWPSRSSS

SEQ ID NO: 14515 - protein, 15 aa, synthetic construct
GPATGPQPAGSLDFP

SEQ ID NO: 14516 - protein, 15 aa, synthetic construct
GPCDPGGETKAQRSE

SEQ ID NO: 14517 - protein, 15 aa, synthetic construct
GPCWLCLHAAPSAGD

SEQ ID NO: 14518 - protein, 15 aa, synthetic construct
GPDAAAAAGRAAAAG

SEQ ID NO: 14519 - protein, 15 aa, synthetic construct
GPDAAGRGVRARSGA

SEQ ID NO: 14520 - protein, 15 aa, synthetic construct
GPDEADSSQVYRRQG

SEQ ID NO: 14521 - protein, 14 aa, synthetic construct
GPDLGVHAVPAARQ

SEQ ID NO: 14522 - protein, 15 aa, synthetic construct
GPDRRRELQLPAAEP

SEQ ID NO: 14523 - protein, 13 aa, synthetic construct
GPDSANSFSGASP

SEQ ID NO: 14524 - protein, 15 aa, synthetic construct
GPEAEGGPPRRAAGI

SEQ ID NO: 14525 - protein, 15 aa, synthetic construct
GPEAGDDAGAEVSAS

SEQ ID NO: 14526 - protein, 15 aa, synthetic construct
GPEEKCGNDQRGRAT

SEQ ID NO: 14527 - protein, 15 aa, synthetic construct
GPEERLPCRRALALE

SEQ ID NO: 14528 - protein, 15 aa, synthetic construct
GPEGGPGAWAAGGCG

SEQ ID NO: 14529 - protein, 14 aa, synthetic construct
GPEGPQRLPLPLWR

SEQ ID NO: 14530 - protein, 15 aa, synthetic construct
GPEHEEVRRAQVLLC

SEQ ID NO: 14531 - protein, 15 aa, synthetic construct
GPELEGLGGTAARRA

SEQ ID NO: 14532 - protein, 15 aa, synthetic construct
GPERPDGHGRGLRRP

SEQ ID NO: 14533 - protein, 15 aa, synthetic construct
GPERRRRAVPLAAER

SEQ ID NO: 14534 - protein, 15 aa, synthetic construct
GPESGGRQRSASSSC

SEQ ID NO: 14535 - protein, 15 aa, synthetic construct
GPEVAGGAAEGAPPP

SEQ ID NO: 14536 - protein, 15 aa, synthetic construct
GPFLQRGPGDAAGDA

SEQ ID NO: 14537 - protein, 15 aa, synthetic construct
GPFQTQMEPVEEGLP

SEQ ID NO: 14538 - protein, 15 aa, synthetic construct
GPFSPPTSATPGTAS

SEQ ID NO: 14539 - protein, 15 aa, synthetic construct
GPGAAGDTGRRPALS

SEQ ID NO: 14540 - protein, 15 aa, synthetic construct
GPGAGSPDERGCGRE

SEQ ID NO: 14541 - protein, 15 aa, synthetic construct
GPGARGDGDRPRAAA

SEQ ID NO: 14542 - protein, 15 aa, synthetic construct
GPGCREQEVPAAAQV

SEQ ID NO: 14543 - protein, 15 aa, synthetic construct
GPGDGAEGPAASAGL

SEQ ID NO: 14544 - protein, 15 aa, synthetic construct
GPGDGCAGVQQPHRE

SEQ ID NO: 14545 - protein, 15 aa, synthetic construct
GPGDGQAAAPAPARG

SEQ ID NO: 14546 - protein, 15 aa, synthetic construct
GPGDPAALAHAQRRL

SEQ ID NO: 14547 - protein, 15 aa, synthetic construct
GPGEAAREGLRRPAP

SEQ ID NO: 14548 - protein, 15 aa, synthetic construct
GPGERREQLLLEKAS

SEQ ID NO: 14549 - protein, 15 aa, synthetic construct
GPGFGPALGHMHAAS

SEQ ID NO: 14550 - protein, 15 aa, synthetic construct
GPGGGGRAAGGNAVT

SEQ ID NO: 14551 - protein, 15 aa, synthetic construct
GPGGRPRVMAGACLP

SEQ ID NO: 14552 - protein, 15 aa, synthetic construct
GPGHDGGGSRARAAR

SEQ ID NO: 14553 - protein, 15 aa, synthetic construct
GPGHHAGAGPRREPA

SEQ ID NO: 14554 - protein, 15 aa, synthetic construct
GPGHRDSRGSGRNGR

SEQ ID NO: 14555 - protein, 15 aa, synthetic construct
GPGKARRARRTSSLP

SEQ ID NO: 14556 - protein, 15 aa, synthetic construct
GPGKTPGFSETALPR

SEQ ID NO: 14557 - protein, 15 aa, synthetic construct
GPGLGAPAAAAAVHP

SEQ ID NO: 14558 - protein, 15 aa, synthetic construct
GPGLRGHGQPSPAGS

SEQ ID NO: 14559 - protein, 15 aa, synthetic construct
GPGNQASLGGQLTRE

SEQ ID NO: 14560 - protein, 15 aa, synthetic construct
GPGPGEGAPRLAAGL

SEQ ID NO: 14561 - protein, 15 aa, synthetic construct
GPGPGSFGGRPELPL

SEQ ID NO: 14562 - protein, 15 aa, synthetic construct
GPGPTLTASRRAGAL

SEQ ID NO: 14563 - protein, 15 aa, synthetic construct
GPGPVPPPAARPLAA

SEQ ID NO: 14564 - protein, 15 aa, synthetic construct
GPGQGRGAAGALGAR

SEQ ID NO: 14565 - protein, 15 aa, synthetic construct
GPGQGSGHGTGFGLG

SEQ ID NO: 14566 - protein, 15 aa, synthetic construct
GPGRAAAAAADPGVC

SEQ ID NO: 14567 - protein, 15 aa, synthetic construct
GPGRGLCPACAPGRR

SEQ ID NO: 14568 - protein, 15 aa, synthetic construct
GPGRRAGGAPPSAPR

SEQ ID NO: 14569 - protein, 15 aa, synthetic construct
GPGSGLGWGPPGEAG

SEQ ID NO: 14570 - protein, 15 aa, synthetic construct
GPGTGSGPGLGPESR

SEQ ID NO: 14571 - protein, 15 aa, synthetic construct
GPGVAAPAREGARRQ

SEQ ID NO: 14572 - protein, 15 aa, synthetic construct
GPHEPGGRRPRGAPV

SEQ ID NO: 14573 - protein, 15 aa, synthetic construct
GPHGPRARSDGDLGS

SEQ ID NO: 14574 - protein, 15 aa, synthetic construct
GPHQAADERVHGMVQ

SEQ ID NO: 14575 - protein, 15 aa, synthetic construct
GPHRALEPQPGVSAL

SEQ ID NO: 14576 - protein, 15 aa, synthetic construct
GPKDALGWTGQGDPR

SEQ ID NO: 14577 - protein, 15 aa, synthetic construct
GPKESCAAVPEDAYP

SEQ ID NO: 14578 - protein, 15 aa, synthetic construct
GPKGHVQVASHSGGG

SEQ ID NO: 14579 - protein, 13 aa, synthetic construct
GPLDPDQEAEVRG

SEQ ID NO: 14580 - protein, 15 aa, synthetic construct
GPLEFAVRGCKGRGR

SEQ ID NO: 14581 - protein, 15 aa, synthetic construct
GPLESGSVRGGEDRG

SEQ ID NO: 14582 - protein, 15 aa, synthetic construct
GPLFLPAGGQLGGPE

SEQ ID NO: 14583 - protein, 15 aa, synthetic construct
GPLFQPSAAETSLCH

SEQ ID NO: 14584 - protein, 15 aa, synthetic construct
GPLGARWAGPSSLPQ

SEQ ID NO: 14585 - protein, 12 aa, synthetic construct
GPLGWTARPVRS

SEQ ID NO: 14586 - protein, 15 aa, synthetic construct
GPLLARTRPALPDAS

SEQ ID NO: 14587 - protein, 15 aa, synthetic construct
GPLLEPWQHHPLQGG

SEQ ID NO: 14588 - protein, 14 aa, synthetic construct
GPLPGACAAAAAVT

SEQ ID NO: 14589 - protein, 15 aa, synthetic construct
GPLPGARAHRERRPP

SEQ ID NO: 14590 - protein, 15 aa, synthetic construct
GPLQMAGRVGAPGRP

SEQ ID NO: 14591 - protein, 15 aa, synthetic construct
GPLRGRAGRPLWGPR

SEQ ID NO: 14592 - protein, 15 aa, synthetic construct
GPLRLDQRPPGDQRD

SEQ ID NO: 14593 - protein, 15 aa, synthetic construct
GPLRRRDAGPLRGRR

SEQ ID NO: 14594 - protein, 15 aa, synthetic construct
GPLSRSARGRPGPDA

SEQ ID NO: 14595 - protein, 13 aa, synthetic construct
GPLWAAGEMLAAP

SEQ ID NO: 14596 - protein, 15 aa, synthetic construct
GPPAAADARRGAALG

SEQ ID NO: 14597 - protein, 15 aa, synthetic construct
GPPAGASARRGRRQQ

SEQ ID NO: 14598 - protein, 15 aa, synthetic construct
GPPATAPAVVCPAAA

SEQ ID NO: 14599 - protein, 15 aa, synthetic construct
GPPDTLGQHPPRGSP

SEQ ID NO: 14600 - protein, 15 aa, synthetic construct
GPPDVGGPRLLRVEP

SEQ ID NO: 14601 - protein, 15 aa, synthetic construct
GPPECAGRRPHLRPL

SEQ ID NO: 14602 - protein, 15 aa, synthetic construct
GPPGAAQAPGVRGRR

SEQ ID NO: 14603 - protein, 15 aa, synthetic construct
GPPGAVRAPHTRLCP

SEQ ID NO: 14604 - protein, 15 aa, synthetic construct
GPPGTAPDPLPPSFP

SEQ ID NO: 14605 - protein, 15 aa, synthetic construct
GPPGVSAGPGAGGRC

SEQ ID NO: 14606 - protein, 15 aa, synthetic construct
GPPLSLPRQLGCHPS

SEQ ID NO: 14607 - protein, 15 aa, synthetic construct
GPPSALALSVPFPSP

SEQ ID NO: 14608 - protein, 15 aa, synthetic construct
GPPSARLGAGAAGPC

SEQ ID NO: 14609 - protein, 15 aa, synthetic construct
GPPTPAAARPRSSPR

SEQ ID NO: 14610 - protein, 15 aa, synthetic construct
GPPVGPGSPARARPP

SEQ ID NO: 14611 - protein, 15 aa, synthetic construct
GPQDGEGQHRPHVRQ

SEQ ID NO: 14612 - protein, 15 aa, synthetic construct
GPQEATADVPGEVTD

SEQ ID NO: 14613 - protein, 15 aa, synthetic construct
GPQGPQEDPVLGARA

SEQ ID NO: 14614 - protein, 15 aa, synthetic construct
GPQHRDGADHLEGAV

SEQ ID NO: 14615 - protein, 15 aa, synthetic construct
GPQPAPRRPRPAEPA

SEQ ID NO: 14616 - protein, 15 aa, synthetic construct
GPQPHLSSPGHRDGL

SEQ ID NO: 14617 - protein, 15 aa, synthetic construct
GPQPRADLSVLPVAA

SEQ ID NO: 14618 - protein, 15 aa, synthetic construct
GPQPRCRGARGPAGG

SEQ ID NO: 14619 - protein, 15 aa, synthetic construct
GPQSRAGPGVPHPDD

SEQ ID NO: 14620 - protein, 15 aa, synthetic construct
GPQSSLGTSAPSHHG

SEQ ID NO: 14621 - protein, 15 aa, synthetic construct
GPRAEPGGTTGLSVP

SEQ ID NO: 14622 - protein, 15 aa, synthetic construct
GPRDARGGETQSRGD

SEQ ID NO: 14623 - protein, 15 aa, synthetic construct
GPRDGPVLQVHHGHL

SEQ ID NO: 14624 - protein, 15 aa, synthetic construct
GPREAPAGWALPPAA

SEQ ID NO: 14625 - protein, 15 aa, synthetic construct
GPRESQGGGQLEEIH

SEQ ID NO: 14626 - protein, 15 aa, synthetic construct
GPRGAAGGQRGSSSQ

SEQ ID NO: 14627 - protein, 15 aa, synthetic construct
GPRGGSGAGRRQPAP

SEQ ID NO: 14628 - protein, 15 aa, synthetic construct
GPRGLEERTGKHREG

SEQ ID NO: 14629 - protein, 15 aa, synthetic construct
GPRGLRGLQPPCSAP

SEQ ID NO: 14630 - protein, 15 aa, synthetic construct
GPRGRERAHRDQRGR

SEQ ID NO: 14631 - protein, 15 aa, synthetic construct
GPRGRGMGAGQHSAP

SEQ ID NO: 14632 - protein, 15 aa, synthetic construct
GPRHAAGRDPICPAA

SEQ ID NO: 14633 - protein, 15 aa, synthetic construct
GPRHAPSGCCPAAGQ

SEQ ID NO: 14634 - protein, 15 aa, synthetic construct
GPRPSSQTLQEGDSP

SEQ ID NO: 14635 - protein, 15 aa, synthetic construct
GPRQESRCPGHDLDC

SEQ ID NO: 14636 - protein, 15 aa, synthetic construct
GPRQPGRGPPGRCGH

SEQ ID NO: 14637 - protein, 15 aa, synthetic construct
GPRQPRRGALPGGEH

SEQ ID NO: 14638 - protein, 15 aa, synthetic construct
GPRQRRPRAAARRAP

SEQ ID NO: 14639 - protein, 15 aa, synthetic construct
GPRRAEAAGSLWPSA

SEQ ID NO: 14640 - protein, 15 aa, synthetic construct
GPRRARRWRRRRGEG

SEQ ID NO: 14641 - protein, 15 aa, synthetic construct
GPRRAVAAPAWGASA

SEQ ID NO: 14642 - protein, 15 aa, synthetic construct
GPRRDPGGSRQVALP

SEQ ID NO: 14643 - protein, 15 aa, synthetic construct
GPRRGAAGGSPGDGT

SEQ ID NO: 14644 - protein, 15 aa, synthetic construct
GPRRGGLQERRAAAA

SEQ ID NO: 14645 - protein, 15 aa, synthetic construct
GPRRGQSPSCWRGSA

SEQ ID NO: 14646 - protein, 15 aa, synthetic construct
GPRRGRPRREPGTAH

SEQ ID NO: 14647 - protein, 15 aa, synthetic construct
GPRRPLGLLQSPGLP

SEQ ID NO: 14648 - protein, 15 aa, synthetic construct
GPRRQGRARAGRRAA

SEQ ID NO: 14649 - protein, 15 aa, synthetic construct
GPRRRPRPSRSRPSS

SEQ ID NO: 14650 - protein, 15 aa, synthetic construct
GPRRRPRTAGAPARP

SEQ ID NO: 14651 - protein, 15 aa, synthetic construct
GPRRSPRAEIAAAAS

SEQ ID NO: 14652 - protein, 15 aa, synthetic construct
GPRSEDLFPGRLLVF

SEQ ID NO: 14653 - protein, 15 aa, synthetic construct
GPRSPPGAVDSAAFP

SEQ ID NO: 14654 - protein, 15 aa, synthetic construct
GPRTARRPVAASCAR

SEQ ID NO: 14655 - protein, 15 aa, synthetic construct
GPRTLLEAACPWRGA

SEQ ID NO: 14656 - protein, 15 aa, synthetic construct
GPRVRGPGPRRERGG

SEQ ID NO: 14657 - protein, 15 aa, synthetic construct
GPSAAACAQEEAAAV

SEQ ID NO: 14658 - protein, 15 aa, synthetic construct
GPSAAAPGGGPSPGR

SEQ ID NO: 14659 - protein, 15 aa, synthetic construct
GPSAAPPGRRDRSGR

SEQ ID NO: 14660 - protein, 15 aa, synthetic construct
GPSALSQGQTASATA

SEQ ID NO: 14661 - protein, 15 aa, synthetic construct
GPSCGDAGLEGPGGR

SEQ ID NO: 14662 - protein, 15 aa, synthetic construct
GPSDQRDTPEPRAPS

SEQ ID NO: 14663 - protein, 15 aa, synthetic construct
GPSKSQGPPSWALLP

SEQ ID NO: 14664 - protein, 15 aa, synthetic construct
GPSLPAAAAAVATGL

SEQ ID NO: 14665 - protein, 15 aa, synthetic construct
GPSRSNLKDEMRAKW

SEQ ID NO: 14666 - protein, 15 aa, synthetic construct
GPSSMPLHPRPFLHA

SEQ ID NO: 14667 - protein, 15 aa, synthetic construct
GPSSQRPEARLDAIP

SEQ ID NO: 14668 - protein, 15 aa, synthetic construct
GPTAQVCNLGAVPLE

SEQ ID NO: 14669 - protein, 14 aa, synthetic construct
GPTDGSFLPAVPVP

SEQ ID NO: 14670 - protein, 15 aa, synthetic construct
GPTIQCPQAEEERPL

SEQ ID NO: 14671 - protein, 15 aa, synthetic construct
GPTLPYGRGPQQGPQ

SEQ ID NO: 14672 - protein, 15 aa, synthetic construct
GPTQGVPAGCPEERW

SEQ ID NO: 14673 - protein, 15 aa, synthetic construct
GPVHPPAPGPSSKIL

SEQ ID NO: 14674 - protein, 15 aa, synthetic construct
GPVHRPVARDVVLHQ

SEQ ID NO: 14675 - protein, 15 aa, synthetic construct
GPVRHHLLQDRAGLS

SEQ ID NO: 14676 - protein, 15 aa, synthetic construct
GPVRRPQGLESQPQR

SEQ ID NO: 14677 - protein, 15 aa, synthetic construct
GPWEALPHSGPAGFH

SEQ ID NO: 14678 - protein, 14 aa, synthetic construct
GPWGLWPPAAPGCA

SEQ ID NO: 14679 - protein, 15 aa, synthetic construct
GPWSRRRPTWSSTWT

SEQ ID NO: 14680 - protein, 15 aa, synthetic construct
GPYPELLREAAVSGQ

SEQ ID NO: 14681 - protein, 15 aa, synthetic construct
GQAAQPGDAAEVGGA

SEQ ID NO: 14682 - protein, 15 aa, synthetic construct
GQADGGADRAGGAVH

SEQ ID NO: 14683 - protein, 15 aa, synthetic construct
GQAEEGAERAGHGGP

SEQ ID NO: 14684 - protein, 15 aa, synthetic construct
GQAEENGAKRAPGGL

SEQ ID NO: 14685 - protein, 15 aa, synthetic construct
GQAGGGGGGGLRGRR

SEQ ID NO: 14686 - protein, 15 aa, synthetic construct
GQALQGPRAPLPVGA

SEQ ID NO: 14687 - protein, 15 aa, synthetic construct
GQAQAGARAERPRPL

SEQ ID NO: 14688 - protein, 15 aa, synthetic construct
GQAQLAVHPHRGGEE

SEQ ID NO: 14689 - protein, 15 aa, synthetic construct
GQARHGAVARPAGAG

SEQ ID NO: 14690 - protein, 15 aa, synthetic construct
GQATGPQETAAVGGR

SEQ ID NO: 14691 - protein, 15 aa, synthetic construct
GQAVWGAPERGSPQT

SEQ ID NO: 14692 - protein, 14 aa, synthetic construct
GQCKNELLPGIPHT

SEQ ID NO: 14693 - protein, 15 aa, synthetic construct
GQDLDNDNDSINPPI

SEQ ID NO: 14694 - protein, 15 aa, synthetic construct
GQDLVWDVEETAPGE

SEQ ID NO: 14695 - protein, 15 aa, synthetic construct
GQDPGGPCEFLASPA

SEQ ID NO: 14696 - protein, 15 aa, synthetic construct
GQEAEAGAQPGSVSG

SEQ ID NO: 14697 - protein, 15 aa, synthetic construct
GQEDAGRRRHRGALA

SEQ ID NO: 14698 - protein, 15 aa, synthetic construct
GQEGQEGEEGPRRGE

SEQ ID NO: 14699 - protein, 15 aa, synthetic construct
GQEHPPIPGATGHPQ

SEQ ID NO: 14700 - protein, 12 aa, synthetic construct
GQEKARATAIFI

SEQ ID NO: 14701 - protein, 12 aa, synthetic construct
GQELAAAAHPGA

SEQ ID NO: 14702 - protein, 15 aa, synthetic construct
GQEPAQSAPAPGEAR

SEQ ID NO: 14703 - protein, 15 aa, synthetic construct
GQEPDEALQATSVLP

SEQ ID NO: 14704 - protein, 15 aa, synthetic construct
GQEPGSAAAAPGVGT

SEQ ID NO: 14705 - protein, 15 aa, synthetic construct
GQEQAATRPAEAGGP

SEQ ID NO: 14706 - protein, 15 aa, synthetic construct
GQEQQSGPRVRDTEV

SEQ ID NO: 14707 - protein, 15 aa, synthetic construct
GQERRPLRPRSGRKP

SEQ ID NO: 14708 - protein, 15 aa, synthetic construct
GQFPEQTGTFALVPS

SEQ ID NO: 14709 - protein, 15 aa, synthetic construct
GQFREGSGGDGAVGR

SEQ ID NO: 14710 - protein, 15 aa, synthetic construct
GQGAAQGGPGAAAAA

SEQ ID NO: 14711 - protein, 15 aa, synthetic construct
GQGAGGGAEERLGRR

SEQ ID NO: 14712 - protein, 15 aa, synthetic construct
GQGAGPLPGPAGGAG

SEQ ID NO: 14713 - protein, 15 aa, synthetic construct
GQGAQPRRCAAGGKR

SEQ ID NO: 14714 - protein, 15 aa, synthetic construct
GQGCWCPRTPLTTAL

SEQ ID NO: 14715 - protein, 15 aa, synthetic construct
GQGKRENGRCRRRCC

SEQ ID NO: 14716 - protein, 15 aa, synthetic construct
GQGLAAGAPRQDFAS

SEQ ID NO: 14717 - protein, 15 aa, synthetic construct
GQGPRGHERRVRGDP

SEQ ID NO: 14718 - protein, 12 aa, synthetic construct
GQGPTETAPSLT

SEQ ID NO: 14719 - protein, 15 aa, synthetic construct
GQGRRGEGGGDGAND

SEQ ID NO: 14720 - protein, 15 aa, synthetic construct
GQGSDGGPRRGSAEG

SEQ ID NO: 14721 - protein, 15 aa, synthetic construct
GQGVGAERGGPGEPE

SEQ ID NO: 14722 - protein, 15 aa, synthetic construct
GQHLPAYPWTLCSAP

SEQ ID NO: 14723 - protein, 15 aa, synthetic construct
GQHRGPGCLLGGGVP

SEQ ID NO: 14724 - protein, 15 aa, synthetic construct
GQKSKERPCGFLWVP

SEQ ID NO: 14725 - protein, 14 aa, synthetic construct
GQLCQVSTEKSLKE

SEQ ID NO: 14726 - protein, 15 aa, synthetic construct
GQLEAEPAGHLPVLR

SEQ ID NO: 14727 - protein, 15 aa, synthetic construct
GQLHALLVAEQCVRA

SEQ ID NO: 14728 - protein, 15 aa, synthetic construct
GQLHEPRSQDAVHAL

SEQ ID NO: 14729 - protein, 15 aa, synthetic construct
GQLHTCQWQLGQSVR

SEQ ID NO: 14730 - protein, 15 aa, synthetic construct
GQLHVSHQQDDRVQP

SEQ ID NO: 14731 - protein, 15 aa, synthetic construct
GQLPGTDSGALGRRW

SEQ ID NO: 14732 - protein, 15 aa, synthetic construct
GQLRGETAPGEAGSP

SEQ ID NO: 14733 - protein, 12 aa, synthetic construct
GQLSPEGQRERD

SEQ ID NO: 14734 - protein, 15 aa, synthetic construct
GQLVHSTNGYWMPIM

SEQ ID NO: 14735 - protein, 15 aa, synthetic construct
GQNGQLSGFGSPTRP

SEQ ID NO: 14736 - protein, 15 aa, synthetic construct
GQNLGISETHHCPSL

SEQ ID NO: 14737 - protein, 15 aa, synthetic construct
GQPAAGAARENGAPW

SEQ ID NO: 14738 - protein, 15 aa, synthetic construct
GQPALQPQRLPCALV

SEQ ID NO: 14739 - protein, 13 aa, synthetic construct
GQPASLRCGPCPP

SEQ ID NO: 14740 - protein, 15 aa, synthetic construct
GQPCSCCSPTEPKET

SEQ ID NO: 14741 - protein, 15 aa, synthetic construct
GQPELQGSPGRRDRR

SEQ ID NO: 14742 - protein, 15 aa, synthetic construct
GQPGAAAPALTDSTA

SEQ ID NO: 14743 - protein, 15 aa, synthetic construct
GQPGQEGGGVRQRHR

SEQ ID NO: 14744 - protein, 15 aa, synthetic construct
GQPHIGRRKRRRRRR

SEQ ID NO: 14745 - protein, 15 aa, synthetic construct
GQPHLRPPGVCKGLH

SEQ ID NO: 14746 - protein, 15 aa, synthetic construct
GQPLERQRRPRGGAG

SEQ ID NO: 14747 - protein, 15 aa, synthetic construct
GQPPPPDPWKQPDPP

SEQ ID NO: 14748 - protein, 15 aa, synthetic construct
GQPRDGRADPAGQQT

SEQ ID NO: 14749 - protein, 15 aa, synthetic construct
GQQGDPERLPVPGDR

SEQ ID NO: 14750 - protein, 15 aa, synthetic construct
GQQLEAWPGHRALCG

SEQ ID NO: 14751 - protein, 13 aa, synthetic construct
GQQRCPHERQQLH

SEQ ID NO: 14752 - protein, 15 aa, synthetic construct
GQRAGGPRTAVQGQS

SEQ ID NO: 14753 - protein, 15 aa, synthetic construct
GQREDPVHPGGGAAA

SEQ ID NO: 14754 - protein, 15 aa, synthetic construct
GQRERAPRGSSGEFL

SEQ ID NO: 14755 - protein, 12 aa, synthetic construct
GQRGGRPALPGG

SEQ ID NO: 14756 - protein, 15 aa, synthetic construct
GQRGTRQQSPCGVDS

SEQ ID NO: 14757 - protein, 15 aa, synthetic construct
GQRPERARTAGLDGQ

SEQ ID NO: 14758 - protein, 15 aa, synthetic construct
GQRPLGPGAAGRLPR

SEQ ID NO: 14759 - protein, 15 aa, synthetic construct
GQRPREPLLQSHDDQ

SEQ ID NO: 14760 - protein, 15 aa, synthetic construct
GQRPRQEGHRAGGER

SEQ ID NO: 14761 - protein, 15 aa, synthetic construct
GQRQQPEQPDSEAAA

SEQ ID NO: 14762 - protein, 15 aa, synthetic construct
GQRRGQEAILEAQQQ

SEQ ID NO: 14763 - protein, 14 aa, synthetic construct
GQRRRRQEGQRAGE

SEQ ID NO: 14764 - protein, 15 aa, synthetic construct
GQRRRRRERLRGGAA

SEQ ID NO: 14765 - protein, 15 aa, synthetic construct
GQRSPAAPAAAESPG

SEQ ID NO: 14766 - protein, 15 aa, synthetic construct
GQRTRWRRGCGCWRR

SEQ ID NO: 14767 - protein, 15 aa, synthetic construct
GQRVQEEALLEGSGG

SEQ ID NO: 14768 - protein, 15 aa, synthetic construct
GQSFVSTASPLASGV

SEQ ID NO: 14769 - protein, 15 aa, synthetic construct
GQSGLPAVRAGPATL

SEQ ID NO: 14770 - protein, 15 aa, synthetic construct
GQSHKSDRIPADGVF

SEQ ID NO: 14771 - protein, 15 aa, synthetic construct
GQSLRPPLQVAADRG

SEQ ID NO: 14772 - protein, 15 aa, synthetic construct
GQSLVPARQRPDAEP

SEQ ID NO: 14773 - protein, 15 aa, synthetic construct
GQSRTSRREDEHPGS

SEQ ID NO: 14774 - protein, 15 aa, synthetic construct
GQSVETADVPSVRHL

SEQ ID NO: 14775 - protein, 13 aa, synthetic construct
GQSVPRYPAASAS

SEQ ID NO: 14776 - protein, 15 aa, synthetic construct
GQTRAAAQGGALRGR

SEQ ID NO: 14777 - protein, 15 aa, synthetic construct
GQTREPEPEPATQHP

SEQ ID NO: 14778 - protein, 15 aa, synthetic construct
GQVATGLPELWGSEA

SEQ ID NO: 14779 - protein, 15 aa, synthetic construct
GQVDPMFPCGRMHLW

SEQ ID NO: 14780 - protein, 15 aa, synthetic construct
GQVEMPEFLQVQGEG

SEQ ID NO: 14781 - protein, 15 aa, synthetic construct
GQVESVPAPTSGTSA

SEQ ID NO: 14782 - protein, 15 aa, synthetic construct
GQVHAAAAPGGMGAD

SEQ ID NO: 14783 - protein, 15 aa, synthetic construct
GQVPLGDPTSHPAGA

SEQ ID NO: 14784 - protein, 15 aa, synthetic construct
GQVQMLSQPEPEQIL

SEQ ID NO: 14785 - protein, 15 aa, synthetic construct
GQWGGWPPAERRGKH

SEQ ID NO: 14786 - protein, 15 aa, synthetic construct
GQWTRPNGAGTWALT

SEQ ID NO: 14787 - protein, 15 aa, synthetic construct
GRAAAGGEADLRHLP

SEQ ID NO: 14788 - protein, 15 aa, synthetic construct
GRAAASGRPSAPASS

SEQ ID NO: 14789 - protein, 15 aa, synthetic construct
GRAADVTRGGDPVWQ

SEQ ID NO: 14790 - protein, 15 aa, synthetic construct
GRAAGERERGRAGPH

SEQ ID NO: 14791 - protein, 15 aa, synthetic construct
GRAAGERGAQAPGGQ

SEQ ID NO: 14792 - protein, 15 aa, synthetic construct
GRAAGQRHERGADVD

SEQ ID NO: 14793 - protein, 15 aa, synthetic construct
GRAAPARPRGGRGRG

SEQ ID NO: 14794 - protein, 15 aa, synthetic construct
GRAAPRAVARGPLLD

SEQ ID NO: 14795 - protein, 15 aa, synthetic construct
GRAAPRGRGAEAGGG

SEQ ID NO: 14796 - protein, 15 aa, synthetic construct
GRAAQADAFPCWGRD

SEQ ID NO: 14797 - protein, 15 aa, synthetic construct
GRAARVRPAPAPAPA

SEQ ID NO: 14798 - protein, 15 aa, synthetic construct
GRAATQENLLPPAGP

SEQ ID NO: 14799 - protein, 15 aa, synthetic construct
GRACGAERGGGGCSG

SEQ ID NO: 14800 - protein, 15 aa, synthetic construct
GRACGAGGAGETSGR

SEQ ID NO: 14801 - protein, 15 aa, synthetic construct
GRACPPPRRPDGEAG

SEQ ID NO: 14802 - protein, 15 aa, synthetic construct
GRAGAAVAAVAAVAA

SEQ ID NO: 14803 - protein, 15 aa, synthetic construct
GRAGARRGGGRGSPR

SEQ ID NO: 14804 - protein, 15 aa, synthetic construct
GRAGGARRGGGGRGR

SEQ ID NO: 14805 - protein, 15 aa, synthetic construct
GRAGGRRGAGLGRSP

SEQ ID NO: 14806 - protein, 15 aa, synthetic construct
GRAGGVAPRLGLANA

SEQ ID NO: 14807 - protein, 15 aa, synthetic construct
GRAGRARGDRTRWRE

SEQ ID NO: 14808 - protein, 15 aa, synthetic construct
GRAGSQRGESAVPAQ

SEQ ID NO: 14809 - protein, 15 aa, synthetic construct
GRAHSPGAGPRLAAL

SEQ ID NO: 14810 - protein, 15 aa, synthetic construct
GRAIPRVRARTARRP

SEQ ID NO: 14811 - protein, 15 aa, synthetic construct
GRAKDQPGAQGHHED

SEQ ID NO: 14812 - protein, 15 aa, synthetic construct
GRALQQLGVAGGPGA

SEQ ID NO: 14813 - protein, 15 aa, synthetic construct
GRAPGAAGRDAHGGQ

SEQ ID NO: 14814 - protein, 15 aa, synthetic construct
GRAPQGGVPAGREGG

SEQ ID NO: 14815 - protein, 15 aa, synthetic construct
GRAPQPGPRGGRLRR

SEQ ID NO: 14816 - protein, 15 aa, synthetic construct
GRAPQPSALAAAALS

SEQ ID NO: 14817 - protein, 12 aa, synthetic construct
GRAPRLRPEDQQ

SEQ ID NO: 14818 - protein, 15 aa, synthetic construct
GRAPRSPAGMGVCAP

SEQ ID NO: 14819 - protein, 15 aa, synthetic construct
GRAQVGGAGADPEPQ

SEQ ID NO: 14820 - protein, 15 aa, synthetic construct
GRARGAPAPPRAQPG

SEQ ID NO: 14821 - protein, 15 aa, synthetic construct
GRARGRRAARGEPGR

SEQ ID NO: 14822 - protein, 15 aa, synthetic construct
GRARGVRVQHAAAGL

SEQ ID NO: 14823 - protein, 15 aa, synthetic construct
GRARPAPRRPRRLCA

SEQ ID NO: 14824 - protein, 15 aa, synthetic construct
GRARPPRPPRRARRA

SEQ ID NO: 14825 - protein, 15 aa, synthetic construct
GRARRPPAARPAAAT

SEQ ID NO: 14826 - protein, 15 aa, synthetic construct
GRARTLRGRPSSGLE

SEQ ID NO: 14827 - protein, 15 aa, synthetic construct
GRARWRRRPGKMAAA

SEQ ID NO: 14828 - protein, 15 aa, synthetic construct
GRASEAPAAAPASGA

SEQ ID NO: 14829 - protein, 15 aa, synthetic construct
GRASRPRARVRRAPG

SEQ ID NO: 14830 - protein, 15 aa, synthetic construct
GRASSPSPRGTGCAS

SEQ ID NO: 14831 - protein, 15 aa, synthetic construct
GRASTPTTGQSKSPG

SEQ ID NO: 14832 - protein, 15 aa, synthetic construct
GRAVQGSAEGPAGPR

SEQ ID NO: 14833 - protein, 15 aa, synthetic construct
GRCASLPTAGTPTHG

SEQ ID NO: 14834 - protein, 15 aa, synthetic construct
GRCGAEVGELGSLQV

SEQ ID NO: 14835 - protein, 15 aa, synthetic construct
GRCLGRDRNQAPPGL

SEQ ID NO: 14836 - protein, 15 aa, synthetic construct
GRCPPSAGAGAPAPG

SEQ ID NO: 14837 - protein, 15 aa, synthetic construct
GRCRGCGGGGAYGCP

SEQ ID NO: 14838 - protein, 15 aa, synthetic construct
GRCRGRIPRREGAGY

SEQ ID NO: 14839 - protein, 15 aa, synthetic construct
GRDGDCDSAAGVACG

SEQ ID NO: 14840 - protein, 15 aa, synthetic construct
GRDGRGHSREAGTPA

SEQ ID NO: 14841 - protein, 15 aa, synthetic construct
GRDGSEAALEANQTP

SEQ ID NO: 14842 - protein, 15 aa, synthetic construct
GRDHPAPLVQAHPGA

SEQ ID NO: 14843 - protein, 14 aa, synthetic construct
GRDHQETNLEAPLQ

SEQ ID NO: 14844 - protein, 15 aa, synthetic construct
GRDHVKEAEAPPGRG

SEQ ID NO: 14845 - protein, 15 aa, synthetic construct
GRDPPAGAGGGGRGP

SEQ ID NO: 14846 - protein, 15 aa, synthetic construct
GRDQDHLPLGWAGDA

SEQ ID NO: 14847 - protein, 15 aa, synthetic construct
GRDQRGGGGAGAAGC

SEQ ID NO: 14848 - protein, 13 aa, synthetic construct
GRDRGRSGPLQDQ

SEQ ID NO: 14849 - protein, 15 aa, synthetic construct
GRDRTDTRCGGGAGG

SEQ ID NO: 14850 - protein, 15 aa, synthetic construct
GRDSLGAPGALPAEP

SEQ ID NO: 14851 - protein, 13 aa, synthetic construct
GRDVEEEGRGHFP

SEQ ID NO: 14852 - protein, 15 aa, synthetic construct
GRDVQLDSEDAGGLD

SEQ ID NO: 14853 - protein, 15 aa, synthetic construct
GRDWAAGAADAARAQ

SEQ ID NO: 14854 - protein, 15 aa, synthetic construct
GREAKGLAVQHAKPQ

SEQ ID NO: 14855 - protein, 15 aa, synthetic construct
GRECGGTGAAFSQAA

SEQ ID NO: 14856 - protein, 15 aa, synthetic construct
GREDGLPQGLLHQGQ

SEQ ID NO: 14857 - protein, 12 aa, synthetic construct
GREGGPFAKEEA

SEQ ID NO: 14858 - protein, 15 aa, synthetic construct
GREGGRGERAAERGH

SEQ ID NO: 14859 - protein, 15 aa, synthetic construct
GREGRRGHERPCPLP

SEQ ID NO: 14860 - protein, 15 aa, synthetic construct
GRELRAEAPGRPAAG

SEQ ID NO: 14861 - protein, 15 aa, synthetic construct
GRERLGHGDGAAQEG

SEQ ID NO: 14862 - protein, 15 aa, synthetic construct
GRERRGGAAAGRASA

SEQ ID NO: 14863 - protein, 15 aa, synthetic construct
GREVGWSGGLGQPGP

SEQ ID NO: 14864 - protein, 15 aa, synthetic construct
GRFDGHGHEPPEAPE

SEQ ID NO: 14865 - protein, 15 aa, synthetic construct
GRGAADALRDPLPGT

SEQ ID NO: 14866 - protein, 15 aa, synthetic construct
GRGAAGGGDAAAPDT

SEQ ID NO: 14867 - protein, 15 aa, synthetic construct
GRGAAVRVASPPLQP

SEQ ID NO: 14868 - protein, 15 aa, synthetic construct
GRGADCPGQGRGSGF

SEQ ID NO: 14869 - protein, 15 aa, synthetic construct
GRGAEHGARAAHQPA

SEQ ID NO: 14870 - protein, 15 aa, synthetic construct
GRGAGAAAPVPASGV

SEQ ID NO: 14871 - protein, 15 aa, synthetic construct
GRGAHGAGRDAGPGG

SEQ ID NO: 14872 - protein, 15 aa, synthetic construct
GRGAPARPSRRWSPS

SEQ ID NO: 14873 - protein, 15 aa, synthetic construct
GRGAPDACAQGPSPG

SEQ ID NO: 14874 - protein, 15 aa, synthetic construct
GRGARGPPKTRAHGL

SEQ ID NO: 14875 - protein, 15 aa, synthetic construct
GRGARGSPRPPSRAG

SEQ ID NO: 14876 - protein, 15 aa, synthetic construct
GRGASAGGAAAVAAA

SEQ ID NO: 14877 - protein, 15 aa, synthetic construct
GRGAVQPRMPAEPRA

SEQ ID NO: 14878 - protein, 15 aa, synthetic construct
GRGAWRGPGLPAGFA

SEQ ID NO: 14879 - protein, 15 aa, synthetic construct
GRGDAPGRPPGAHGG

SEQ ID NO: 14880 - protein, 15 aa, synthetic construct
GRGDGAGPAPRPGRG

SEQ ID NO: 14881 - protein, 15 aa, synthetic construct
GRGDSRGGGEVPGLE

SEQ ID NO: 14882 - protein, 15 aa, synthetic construct
GRGEGRPPAVPLPGE

SEQ ID NO: 14883 - protein, 15 aa, synthetic construct
GRGELRYAVPRARGP

SEQ ID NO: 14884 - protein, 15 aa, synthetic construct
GRGGDRKQRQRDRGE

SEQ ID NO: 14885 - protein, 15 aa, synthetic construct
GRGGGGGSSGRGGAA

SEQ ID NO: 14886 - protein, 15 aa, synthetic construct
GRGGGQDVAAAELRG

SEQ ID NO: 14887 - protein, 15 aa, synthetic construct
GRGGGRPGRPGGGGG

SEQ ID NO: 14888 - protein, 14 aa, synthetic construct
GRGGIAQGKAASHS

SEQ ID NO: 14889 - protein, 15 aa, synthetic construct
GRGGPGEAAGVGRGQ

SEQ ID NO: 14890 - protein, 15 aa, synthetic construct
GRGGRPAPPPSAAAA

SEQ ID NO: 14891 - protein, 15 aa, synthetic construct
GRGGRPPERLAAGLS

SEQ ID NO: 14892 - protein, 15 aa, synthetic construct
GRGGRRRRPRLRDGG

SEQ ID NO: 14893 - protein, 15 aa, synthetic construct
GRGGWVRGGRGCRGP

SEQ ID NO: 14894 - protein, 15 aa, synthetic construct
GRGLALPGDGRTRPS

SEQ ID NO: 14895 - protein, 15 aa, synthetic construct
GRGLRGHSGGAETGG

SEQ ID NO: 14896 - protein, 15 aa, synthetic construct
GRGNECSQQGAVVDP

SEQ ID NO: 14897 - protein, 15 aa, synthetic construct
GRGNGNEGEAEAHPR

SEQ ID NO: 14898 - protein, 15 aa, synthetic construct
GRGPAAGARAGQVGA

SEQ ID NO: 14899 - protein, 15 aa, synthetic construct
GRGPPVPGAGEGRRG

SEQ ID NO: 14900 - protein, 15 aa, synthetic construct
GRGPRGATLSRAASW

SEQ ID NO: 14901 - protein, 15 aa, synthetic construct
GRGPRTGTAGDGLGQ

SEQ ID NO: 14902 - protein, 15 aa, synthetic construct
GRGPWEPASIPAGTP

SEQ ID NO: 14903 - protein, 15 aa, synthetic construct
GRGQEAAGATSPDLP

SEQ ID NO: 14904 - protein, 15 aa, synthetic construct
GRGQRADPAEPPAAQ

SEQ ID NO: 14905 - protein, 15 aa, synthetic construct
GRGRANHPEDPHHRR

SEQ ID NO: 14906 - protein, 15 aa, synthetic construct
GRGRAPALGAAGGAR

SEQ ID NO: 14907 - protein, 15 aa, synthetic construct
GRGRDAAAAGRRAGR

SEQ ID NO: 14908 - protein, 15 aa, synthetic construct
GRGRGAGGGCPGSPG

SEQ ID NO: 14909 - protein, 15 aa, synthetic construct
GRGRGGQGGSGGAPT

SEQ ID NO: 14910 - protein, 15 aa, synthetic construct
GRGRGGRRGRRRRQG

SEQ ID NO: 14911 - protein, 15 aa, synthetic construct
GRGRGPSASGRAGVS

SEQ ID NO: 14912 - protein, 15 aa, synthetic construct
GRGRGRCAVPSPAPR

SEQ ID NO: 14913 - protein, 15 aa, synthetic construct
GRGRGRPEAGASLCG

SEQ ID NO: 14914 - protein, 15 aa, synthetic construct
GRGRGRQGGSGAARR

SEQ ID NO: 14915 - protein, 15 aa, synthetic construct
GRGRQQEPPYSLHVS

SEQ ID NO: 14916 - protein, 15 aa, synthetic construct
GRGRRCRSEPSLPAT

SEQ ID NO: 14917 - protein, 15 aa, synthetic construct
GRGSEPRPLGGLRDL

SEQ ID NO: 14918 - protein, 15 aa, synthetic construct
GRGTEAEPLGGASRN

SEQ ID NO: 14919 - protein, 15 aa, synthetic construct
GRGTRLRVPEETRLL

SEQ ID NO: 14920 - protein, 15 aa, synthetic construct
GRGVGEDHHQRGRHA

SEQ ID NO: 14921 - protein, 15 aa, synthetic construct
GRGWGAGRGAHFPAY

SEQ ID NO: 14922 - protein, 15 aa, synthetic construct
GRHGKRGRHGKRGRH

SEQ ID NO: 14923 - protein, 15 aa, synthetic construct
GRHHHAQNAAAADLQ

SEQ ID NO: 14924 - protein, 15 aa, synthetic construct
GRHPTRHQRYPEPAL

SEQ ID NO: 14925 - protein, 15 aa, synthetic construct
GRHQEEDADAEAGQG

SEQ ID NO: 14926 - protein, 15 aa, synthetic construct
GRHQEEDADAEARQG

SEQ ID NO: 14927 - protein, 15 aa, synthetic construct
GRHRGKQSLSEAMGF

SEQ ID NO: 14928 - protein, 15 aa, synthetic construct
GRHRHRPSSLRPPKW

SEQ ID NO: 14929 - protein, 15 aa, synthetic construct
GRIGGLRPVPGGGPQ

SEQ ID NO: 14930 - protein, 15 aa, synthetic construct
GRKGRGLCGAGSGVS

SEQ ID NO: 14931 - protein, 15 aa, synthetic construct
GRKITTERPSPSPCR

SEQ ID NO: 14932 - protein, 15 aa, synthetic construct
GRKTEKSDSSQQPPA

SEQ ID NO: 14933 - protein, 12 aa, synthetic construct
GRLGGGEEQESH

SEQ ID NO: 14934 - protein, 15 aa, synthetic construct
GRLGPLQCSEPSPGA

SEQ ID NO: 14935 - protein, 15 aa, synthetic construct
GRLHPLHQPDPGPGP

SEQ ID NO: 14936 - protein, 15 aa, synthetic construct
GRLLPWAVGVGPEAA

SEQ ID NO: 14937 - protein, 15 aa, synthetic construct
GRLPAPPGLWPRAAG

SEQ ID NO: 14938 - protein, 15 aa, synthetic construct
GRLPRHRGGEPGAAQ

SEQ ID NO: 14939 - protein, 15 aa, synthetic construct
GRLQTGADPARREHM

SEQ ID NO: 14940 - protein, 15 aa, synthetic construct
GRLSGAAEMCQAPGS

SEQ ID NO: 14941 - protein, 15 aa, synthetic construct
GRLSPGEAEGSNGGG

SEQ ID NO: 14942 - protein, 15 aa, synthetic construct
GRNAERTLAQDWVSL

SEQ ID NO: 14943 - protein, 12 aa, synthetic construct
GRNGERRETSRK

SEQ ID NO: 14944 - protein, 15 aa, synthetic construct
GRNLEEYLLNCEAWL

SEQ ID NO: 14945 - protein, 15 aa, synthetic construct
GRNPEEAAEGGVREQ

SEQ ID NO: 14946 - protein, 15 aa, synthetic construct
GRNPRAGPAPPRSCN

SEQ ID NO: 14947 - protein, 15 aa, synthetic construct
GRPGGAVGPASWGSG

SEQ ID NO: 14948 - protein, 14 aa, synthetic construct
GRPGKAGSGRAGSG

SEQ ID NO: 14949 - protein, 13 aa, synthetic construct
GRPNPAPAGRPSQ

SEQ ID NO: 14950 - protein, 15 aa, synthetic construct
GRQAKDPYGQREAQQ

SEQ ID NO: 14951 - protein, 15 aa, synthetic construct
GRQDLAALPRAPSGR

SEQ ID NO: 14952 - protein, 15 aa, synthetic construct
GRQGPVEGGRGGLWP

SEQ ID NO: 14953 - protein, 15 aa, synthetic construct
GRQGVHQGAGPVGRA

SEQ ID NO: 14954 - protein, 15 aa, synthetic construct
GRQHPSVPAQAKPLP

SEQ ID NO: 14955 - protein, 14 aa, synthetic construct
GRQPAGNRREHLLS

SEQ ID NO: 14956 - protein, 15 aa, synthetic construct
GRQPGKEEARGAVQA

SEQ ID NO: 14957 - protein, 15 aa, synthetic construct
GRQSRGRRRRPGIPC

SEQ ID NO: 14958 - protein, 15 aa, synthetic construct
GRRAGAGHQGAALVC

SEQ ID NO: 14959 - protein, 15 aa, synthetic construct
GRRAGPGSGTGTAPH

SEQ ID NO: 14960 - protein, 15 aa, synthetic construct
GRRAHPEARVPGRAS

SEQ ID NO: 14961 - protein, 15 aa, synthetic construct
GRRAPLLRPQLRQGP

SEQ ID NO: 14962 - protein, 15 aa, synthetic construct
GRRARPARKGAPPAP

SEQ ID NO: 14963 - protein, 15 aa, synthetic construct
GRRARRRGTAAEAAA

SEQ ID NO: 14964 - protein, 15 aa, synthetic construct
GRRATRPGGAPGGRG

SEQ ID NO: 14965 - protein, 15 aa, synthetic construct
GRRCLCDRQGHVGSL

SEQ ID NO: 14966 - protein, 14 aa, synthetic construct
GRRDGCHDSRAGDE

SEQ ID NO: 14967 - protein, 15 aa, synthetic construct
GRRFQAAASAPAPAA

SEQ ID NO: 14968 - protein, 15 aa, synthetic construct
GRRGGDVPALENPQD

SEQ ID NO: 14969 - protein, 15 aa, synthetic construct
GRRGPARGFLGSRRT

SEQ ID NO: 14970 - protein, 15 aa, synthetic construct
GRRGRGRRGRGRRVP

SEQ ID NO: 14971 - protein, 15 aa, synthetic construct
GRRGRRRGNLRPGLS

SEQ ID NO: 14972 - protein, 14 aa, synthetic construct
GRRGRRSARPRPAL

SEQ ID NO: 14973 - protein, 15 aa, synthetic construct
GRRGRVLGRSRRRLR

SEQ ID NO: 14974 - protein, 15 aa, synthetic construct
GRRHAGETERLADGR

SEQ ID NO: 14975 - protein, 15 aa, synthetic construct
GRRKRRLAPSPHRCA

SEQ ID NO: 14976 - protein, 15 aa, synthetic construct
GRRLAPPRLPARAQP

SEQ ID NO: 14977 - protein, 15 aa, synthetic construct
GRRLPLGSRAPATPP

SEQ ID NO: 14978 - protein, 15 aa, synthetic construct
GRRPACQEAAEQPAP

SEQ ID NO: 14979 - protein, 15 aa, synthetic construct
GRRPPRGACTSRPSS

SEQ ID NO: 14980 - protein, 15 aa, synthetic construct
GRRPRAAPRPPPGAD

SEQ ID NO: 14981 - protein, 15 aa, synthetic construct
GRRPRKTTTHRSCIC

SEQ ID NO: 14982 - protein, 15 aa, synthetic construct
GRRPRPAAPCAAAAR

SEQ ID NO: 14983 - protein, 15 aa, synthetic construct
GRRPSQHQGGDGNVP

SEQ ID NO: 14984 - protein, 15 aa, synthetic construct
GRRPVCQRPGGGAAA

SEQ ID NO: 14985 - protein, 15 aa, synthetic construct
GRRQAGEVAHPHGAL

SEQ ID NO: 14986 - protein, 15 aa, synthetic construct
GRRQPPAVSGAGVRQ

SEQ ID NO: 14987 - protein, 15 aa, synthetic construct
GRRQRGRGARATAGR

SEQ ID NO: 14988 - protein, 15 aa, synthetic construct
GRRQRRHGERQQSRT

SEQ ID NO: 14989 - protein, 15 aa, synthetic construct
GRRRGKRQQNHRGIG

SEQ ID NO: 14990 - protein, 15 aa, synthetic construct
GRRRGQGPPSYPEHL

SEQ ID NO: 14991 - protein, 15 aa, synthetic construct
GRRRHRHRRGRGGRG

SEQ ID NO: 14992 - protein, 15 aa, synthetic construct
GRRRLQEEGAEERGH

SEQ ID NO: 14993 - protein, 15 aa, synthetic construct
GRRRLQRRGGRRRGR

SEQ ID NO: 14994 - protein, 15 aa, synthetic construct
GRRRRAVRGCVRAVR

SEQ ID NO: 14995 - protein, 15 aa, synthetic construct
GRRRRGRRERGRQEG

SEQ ID NO: 14996 - protein, 15 aa, synthetic construct
GRRRRGRRRPPGECQ

SEQ ID NO: 14997 - protein, 15 aa, synthetic construct
GRRRRHKGWSGGTGT

SEQ ID NO: 14998 - protein, 15 aa, synthetic construct
GRRRRPGRDAGGGRW

SEQ ID NO: 14999 - protein, 15 aa, synthetic construct
GRRRRQATGAKMRPL

SEQ ID NO: 15000 - protein, 15 aa, synthetic construct
GRRRRQRAGPGARGA

SEQ ID NO: 15001 - protein, 15 aa, synthetic construct
GRRRRRARGAAGRHP

SEQ ID NO: 15002 - protein, 15 aa, synthetic construct
GRRRRRARGRRRCSA

SEQ ID NO: 15003 - protein, 15 aa, synthetic construct
GRRRRRPGPRGSSGR

SEQ ID NO: 15004 - protein, 15 aa, synthetic construct
GRRRRRRAERRRRRR

SEQ ID NO: 15005 - protein, 15 aa, synthetic construct
GRRRRRRLGRRPAPR

SEQ ID NO: 15006 - protein, 15 aa, synthetic construct
GRRRRRRRRRRRGAP

SEQ ID NO: 15007 - protein, 15 aa, synthetic construct
GRRRWRRGRRRRWEV

SEQ ID NO: 15008 - protein, 15 aa, synthetic construct
GRRSGRHEPQLLGGR

SEQ ID NO: 15009 - protein, 15 aa, synthetic construct
GRRSPSPTRPTRPRP

SEQ ID NO: 15010 - protein, 15 aa, synthetic construct
GRRSRAAAARGPGGR

SEQ ID NO: 15011 - protein, 15 aa, synthetic construct
GRRSRRRVVGEPADW

SEQ ID NO: 15012 - protein, 15 aa, synthetic construct
GRRSSAGLRPRPPAP

SEQ ID NO: 15013 - protein, 15 aa, synthetic construct
GRRTPREPRARRGDR

SEQ ID NO: 15014 - protein, 15 aa, synthetic construct
GRRTRAGSGGAGRRG

SEQ ID NO: 15015 - protein, 15 aa, synthetic construct
GRRWRPPRRPRHADG

SEQ ID NO: 15016 - protein, 15 aa, synthetic construct
GRRWRRRRRPKRRRR

SEQ ID NO: 15017 - protein, 15 aa, synthetic construct
GRSACAHRARCPAQI

SEQ ID NO: 15018 - protein, 15 aa, synthetic construct
GRSASAPQIPGPAQR

SEQ ID NO: 15019 - protein, 13 aa, synthetic construct
GRSDAGDLSASCH

SEQ ID NO: 15020 - protein, 15 aa, synthetic construct
GRSDSGHSRGALPPE

SEQ ID NO: 15021 - protein, 15 aa, synthetic construct
GRSGAADEGPPGRAP

SEQ ID NO: 15022 - protein, 15 aa, synthetic construct
GRSGAADKGPPGLAD

SEQ ID NO: 15023 - protein, 15 aa, synthetic construct
GRSGPLAVVEPLRLP

SEQ ID NO: 15024 - protein, 15 aa, synthetic construct
GRSGPRSRGFRVQLS

SEQ ID NO: 15025 - protein, 15 aa, synthetic construct
GRSGSAAPAAVPAAA

SEQ ID NO: 15026 - protein, 15 aa, synthetic construct
GRSHPGPPVPEAAAM

SEQ ID NO: 15027 - protein, 15 aa, synthetic construct
GRSKADIAARVPGSA

SEQ ID NO: 15028 - protein, 15 aa, synthetic construct
GRSKSPERQDEVQKE

SEQ ID NO: 15029 - protein, 15 aa, synthetic construct
GRSPESRRRRRPHLP

SEQ ID NO: 15030 - protein, 15 aa, synthetic construct
GRSPGARGGGPVGGG

SEQ ID NO: 15031 - protein, 15 aa, synthetic construct
GRSPGTGGPRAVPPA

SEQ ID NO: 15032 - protein, 15 aa, synthetic construct
GRSPQAGARRGPGAG

SEQ ID NO: 15033 - protein, 15 aa, synthetic construct
GRSPREGRALDDGPA

SEQ ID NO: 15034 - protein, 15 aa, synthetic construct
GRSPSPRSAAETGGA

SEQ ID NO: 15035 - protein, 15 aa, synthetic construct
GRSQAVSDARATDAA

SEQ ID NO: 15036 - protein, 15 aa, synthetic construct
GRSQGAFGVPCQAAL

SEQ ID NO: 15037 - protein, 15 aa, synthetic construct
GRSRAKRGTVGKNAR

SEQ ID NO: 15038 - protein, 14 aa, synthetic construct
GRSREAAAGAGAAG

SEQ ID NO: 15039 - protein, 15 aa, synthetic construct
GRSRGRRWAAVGAGA

SEQ ID NO: 15040 - protein, 15 aa, synthetic construct
GRSRPGGPGGRRGRQ

SEQ ID NO: 15041 - protein, 15 aa, synthetic construct
GRSRRAGRERRQRVP

SEQ ID NO: 15042 - protein, 15 aa, synthetic construct
GRSRRGQRRPRPARA

SEQ ID NO: 15043 - protein, 15 aa, synthetic construct
GRSRRRGGQRGRRGR

SEQ ID NO: 15044 - protein, 15 aa, synthetic construct
GRSSAADEGPPGSAP

SEQ ID NO: 15045 - protein, 15 aa, synthetic construct
GRSSLASAQIPPTPP

SEQ ID NO: 15046 - protein, 15 aa, synthetic construct
GRSSRETDQDQDRRG

SEQ ID NO: 15047 - protein, 15 aa, synthetic construct
GRSTESPQTRRADPA

SEQ ID NO: 15048 - protein, 15 aa, synthetic construct
GRSVAGGCGGAPERD

SEQ ID NO: 15049 - protein, 15 aa, synthetic construct
GRSVPPAVCSLPPEE

SEQ ID NO: 15050 - protein, 15 aa, synthetic construct
GRTDDGCGSGCGHRG

SEQ ID NO: 15051 - protein, 15 aa, synthetic construct
GRTPGGPEAPGAGVP

SEQ ID NO: 15052 - protein, 15 aa, synthetic construct
GRVCGAPAEPTDFAA

SEQ ID NO: 15053 - protein, 12 aa, synthetic construct
GRVEPPAAPRAP

SEQ ID NO: 15054 - protein, 15 aa, synthetic construct
GRVGGRERLPRVAGP

SEQ ID NO: 15055 - protein, 15 aa, synthetic construct
GRVGPGGAAGLGGSR

SEQ ID NO: 15056 - protein, 15 aa, synthetic construct
GRVLLPGGVGLSAAR

SEQ ID NO: 15057 - protein, 15 aa, synthetic construct
GRVRARRRVGDREQP

SEQ ID NO: 15058 - protein, 15 aa, synthetic construct
GRVRGAQPPGAGQPE

SEQ ID NO: 15059 - protein, 15 aa, synthetic construct
GRVSELRAAAWAPGG

SEQ ID NO: 15060 - protein, 15 aa, synthetic construct
GRVSGRLAGAGGRPA

SEQ ID NO: 15061 - protein, 15 aa, synthetic construct
GRWGKGQPQRVQKEG

SEQ ID NO: 15062 - protein, 15 aa, synthetic construct
GRWQSGADPEDSLLS

SEQ ID NO: 15063 - protein, 15 aa, synthetic construct
GRWQSSSQEGSGVPE

SEQ ID NO: 15064 - protein, 15 aa, synthetic construct
GRWRGLRGRGWRPAA

SEQ ID NO: 15065 - protein, 15 aa, synthetic construct
GRWSPAPRPGLGPSF

SEQ ID NO: 15066 - protein, 15 aa, synthetic construct
GRYCGAPRHQCGAPS

SEQ ID NO: 15067 - protein, 14 aa, synthetic construct
GRYDPERPPRGGRC

SEQ ID NO: 15068 - protein, 12 aa, synthetic construct
GRYPSRGPQLLE

SEQ ID NO: 15069 - protein, 15 aa, synthetic construct
GSAAAAAATARGAPA

SEQ ID NO: 15070 - protein, 13 aa, synthetic construct
GSAALRGAGRHGQ

SEQ ID NO: 15071 - protein, 15 aa, synthetic construct
GSAASAQLAEGAAAG

SEQ ID NO: 15072 - protein, 15 aa, synthetic construct
GSAASYHLPLEASPF

SEQ ID NO: 15073 - protein, 15 aa, synthetic construct
GSAATPPSRTCGSWR

SEQ ID NO: 15074 - protein, 12 aa, synthetic construct
GSAAVQHLCDGA

SEQ ID NO: 15075 - protein, 12 aa, synthetic construct
GSADKPGHFNST

SEQ ID NO: 15076 - protein, 15 aa, synthetic construct
GSADLAAAAAGVGLG

SEQ ID NO: 15077 - protein, 15 aa, synthetic construct
GSADPTNRAAEPQER

SEQ ID NO: 15078 - protein, 15 aa, synthetic construct
GSAEEAAKEEGAGQP

SEQ ID NO: 15079 - protein, 15 aa, synthetic construct
GSAEGPAERCRGGRA

SEQ ID NO: 15080 - protein, 15 aa, synthetic construct
GSAGGRIHVVFGSPE

SEQ ID NO: 15081 - protein, 15 aa, synthetic construct
GSAGLPQSHGKEWTC

SEQ ID NO: 15082 - protein, 15 aa, synthetic construct
GSAGTPGVRRPSRCC

SEQ ID NO: 15083 - protein, 15 aa, synthetic construct
GSALQPDGGQAEGMW

SEQ ID NO: 15084 - protein, 15 aa, synthetic construct
GSAPAAAPAAPAAAA

SEQ ID NO: 15085 - protein, 15 aa, synthetic construct
GSAPAAAPTALAAAA

SEQ ID NO: 15086 - protein, 15 aa, synthetic construct
GSAPAARVPRPRPPA

SEQ ID NO: 15087 - protein, 14 aa, synthetic construct
GSAPPMDLAPLPAN

SEQ ID NO: 15088 - protein, 15 aa, synthetic construct
GSAPSPGTLHPSPVL

SEQ ID NO: 15089 - protein, 15 aa, synthetic construct
GSAPWPSALAACPSG

SEQ ID NO: 15090 - protein, 15 aa, synthetic construct
GSAQPAPAARRPLWP

SEQ ID NO: 15091 - protein, 15 aa, synthetic construct
GSARARPRARLLRAA

SEQ ID NO: 15092 - protein, 15 aa, synthetic construct
GSARGGAETARRPGA

SEQ ID NO: 15093 - protein, 15 aa, synthetic construct
GSARGPRRGGAQQRP

SEQ ID NO: 15094 - protein, 15 aa, synthetic construct
GSARRGELAPRPRTS

SEQ ID NO: 15095 - protein, 15 aa, synthetic construct
GSARRRCTSQGQARP

SEQ ID NO: 15096 - protein, 15 aa, synthetic construct
GSASAEPGAEPHRSP

SEQ ID NO: 15097 - protein, 15 aa, synthetic construct
GSASAWPPTSSGPAP

SEQ ID NO: 15098 - protein, 15 aa, synthetic construct
GSASCPRSCFDSSFL

SEQ ID NO: 15099 - protein, 15 aa, synthetic construct
GSATRRWQVPEKPWP

SEQ ID NO: 15100 - protein, 15 aa, synthetic construct
GSATSLRVQRLQQER

SEQ ID NO: 15101 - protein, 15 aa, synthetic construct
GSAVRAGKGLPSAAV

SEQ ID NO: 15102 - protein, 15 aa, synthetic construct
GSAVRGPGRGARRLP

SEQ ID NO: 15103 - protein, 15 aa, synthetic construct
GSCISETPAAAPPST

SEQ ID NO: 15104 - protein, 15 aa, synthetic construct
GSCPRSDQPGTRAPA

SEQ ID NO: 15105 - protein, 15 aa, synthetic construct
GSCRGRQLPSSRFQP

SEQ ID NO: 15106 - protein, 15 aa, synthetic construct
GSDEPPGPGGGELQT

SEQ ID NO: 15107 - protein, 15 aa, synthetic construct
GSDGQLHEAGAQPTA

SEQ ID NO: 15108 - protein, 15 aa, synthetic construct
GSDNGTGEQMVSESS

SEQ ID NO: 15109 - protein, 15 aa, synthetic construct
GSDSGGAALGAALAA

SEQ ID NO: 15110 - protein, 15 aa, synthetic construct
GSEAQVATRDAAPPA

SEQ ID NO: 15111 - protein, 15 aa, synthetic construct
GSEAWDPPAGPCPGP

SEQ ID NO: 15112 - protein, 15 aa, synthetic construct
GSEMDYSSADTTQFL

SEQ ID NO: 15113 - protein, 15 aa, synthetic construct
GSEPRRRDPLLCPPA

SEQ ID NO: 15114 - protein, 15 aa, synthetic construct
GSEREEGARPREPRG

SEQ ID NO: 15115 - protein, 15 aa, synthetic construct
GSEVDFSSSADTSRL

SEQ ID NO: 15116 - protein, 14 aa, synthetic construct
GSEVPGSAVAPSSP

SEQ ID NO: 15117 - protein, 15 aa, synthetic construct
GSFGKEDIGVDLPGR

SEQ ID NO: 15118 - protein, 15 aa, synthetic construct
GSFLAPGPHAPEHRP

SEQ ID NO: 15119 - protein, 15 aa, synthetic construct
GSFPKLRSPQMSAHP

SEQ ID NO: 15120 - protein, 15 aa, synthetic construct
GSFSPPCATPSNLGI

SEQ ID NO: 15121 - protein, 15 aa, synthetic construct
GSGAKKMPSSFGCDR

SEQ ID NO: 15122 - protein, 15 aa, synthetic construct
GSGAPESVHRGLGEL

SEQ ID NO: 15123 - protein, 15 aa, synthetic construct
GSGARAAGGAGGQDS

SEQ ID NO: 15124 - protein, 15 aa, synthetic construct
GSGARGSRLPRPSCL

SEQ ID NO: 15125 - protein, 15 aa, synthetic construct
GSGCVGETGSRGPAP

SEQ ID NO: 15126 - protein, 15 aa, synthetic construct
GSGGDAALRQGLQQA

SEQ ID NO: 15127 - protein, 15 aa, synthetic construct
GSGGLHQVHQVPALR

SEQ ID NO: 15128 - protein, 15 aa, synthetic construct
GSGGNLQAPGSQDAS

SEQ ID NO: 15129 - protein, 15 aa, synthetic construct
GSGGRGHPELPRAAS

SEQ ID NO: 15130 - protein, 15 aa, synthetic construct
GSGGSRRPPSAGSER

SEQ ID NO: 15131 - protein, 14 aa, synthetic construct
GSGGWPGGRRGAAD

SEQ ID NO: 15132 - protein, 15 aa, synthetic construct
GSGHCGGSTGRSGRG

SEQ ID NO: 15133 - protein, 15 aa, synthetic construct
GSGIGAGGPRHSGGG

SEQ ID NO: 15134 - protein, 15 aa, synthetic construct
GSGLGAAGRGLGGLA

SEQ ID NO: 15135 - protein, 15 aa, synthetic construct
GSGPGSRKPGASAAA

SEQ ID NO: 15136 - protein, 15 aa, synthetic construct
GSGPRQPAAGGPGVG

SEQ ID NO: 15137 - protein, 15 aa, synthetic construct
GSGQRAGVAAGSPRH

SEQ ID NO: 15138 - protein, 15 aa, synthetic construct
GSGQWRRRRRRRRRR

SEQ ID NO: 15139 - protein, 15 aa, synthetic construct
GSGRAAAPRSAGRGS

SEQ ID NO: 15140 - protein, 15 aa, synthetic construct
GSGREAPSAPREERY

SEQ ID NO: 15141 - protein, 15 aa, synthetic construct
GSGRGPRGLLGPHDL

SEQ ID NO: 15142 - protein, 15 aa, synthetic construct
GSGRKGKRGGPSQER

SEQ ID NO: 15143 - protein, 15 aa, synthetic construct
GSGRKVLGQGEEGAA

SEQ ID NO: 15144 - protein, 15 aa, synthetic construct
GSGRPQPRGAERASR

SEQ ID NO: 15145 - protein, 15 aa, synthetic construct
GSGRQPRDPSAPRDS

SEQ ID NO: 15146 - protein, 15 aa, synthetic construct
GSGRRAAEAGRGRRR

SEQ ID NO: 15147 - protein, 15 aa, synthetic construct
GSGRRSAARTVADPG

SEQ ID NO: 15148 - protein, 15 aa, synthetic construct
GSGSGSGRGARDGNA

SEQ ID NO: 15149 - protein, 14 aa, synthetic construct
GSHAEVRDERQSGE

SEQ ID NO: 15150 - protein, 15 aa, synthetic construct
GSHALAMVAAAVTLE

SEQ ID NO: 15151 - protein, 15 aa, synthetic construct
GSHGHADAPPAAAGN

SEQ ID NO: 15152 - protein, 15 aa, synthetic construct
GSHRPGSPQEGARPL

SEQ ID NO: 15153 - protein, 15 aa, synthetic construct
GSIFPDGHLRAAGVR

SEQ ID NO: 15154 - protein, 15 aa, synthetic construct
GSKLLSCPWLPISGP

SEQ ID NO: 15155 - protein, 15 aa, synthetic construct
GSLAARPCTSAGAFA

SEQ ID NO: 15156 - protein, 12 aa, synthetic construct
GSLAEPHAPGQL

SEQ ID NO: 15157 - protein, 15 aa, synthetic construct
GSLAQSSGELERGRP

SEQ ID NO: 15158 - protein, 15 aa, synthetic construct
GSLGGGRALGAEPAA

SEQ ID NO: 15159 - protein, 15 aa, synthetic construct
GSLGPEQPTHQPRQL

SEQ ID NO: 15160 - protein, 15 aa, synthetic construct
GSLGSSAGSSAGGHC

SEQ ID NO: 15161 - protein, 15 aa, synthetic construct
GSLKEGSFGAIGGGG

SEQ ID NO: 15162 - protein, 15 aa, synthetic construct
GSLRGGGGRQARVRR

SEQ ID NO: 15163 - protein, 15 aa, synthetic construct
GSLSHPQIPGERPQV

SEQ ID NO: 15164 - protein, 15 aa, synthetic construct
GSLSSATSTSSRRSP

SEQ ID NO: 15165 - protein, 15 aa, synthetic construct
GSLWGGEEQQEEDRE

SEQ ID NO: 15166 - protein, 15 aa, synthetic construct
GSLWGRQCGPHGTSG

SEQ ID NO: 15167 - protein, 15 aa, synthetic construct
GSNAAGAALFPRDSV

SEQ ID NO: 15168 - protein, 15 aa, synthetic construct
GSNEEGASAATGGLG

SEQ ID NO: 15169 - protein, 15 aa, synthetic construct
GSNGAGRPEAGATPA

SEQ ID NO: 15170 - protein, 15 aa, synthetic construct
GSNRDGGWPWDSRRL

SEQ ID NO: 15171 - protein, 15 aa, synthetic construct
GSPAAAKGSARSRQR

SEQ ID NO: 15172 - protein, 15 aa, synthetic construct
GSPADQRRDRAAAPQ

SEQ ID NO: 15173 - protein, 15 aa, synthetic construct
GSPAEIRALVAACRG

SEQ ID NO: 15174 - protein, 14 aa, synthetic construct
GSPAPQAQVQSTPE

SEQ ID NO: 15175 - protein, 15 aa, synthetic construct
GSPCAAQEDRGPYGV

SEQ ID NO: 15176 - protein, 15 aa, synthetic construct
GSPDQSTAPVLLGTS

SEQ ID NO: 15177 - protein, 15 aa, synthetic construct
GSPDSTFPGAPAPAL

SEQ ID NO: 15178 - protein, 15 aa, synthetic construct
GSPGFGAAERGSEAG

SEQ ID NO: 15179 - protein, 15 aa, synthetic construct
GSPGGSPGGARLQRS

SEQ ID NO: 15180 - protein, 15 aa, synthetic construct
GSPGPGRHLGQVRRR

SEQ ID NO: 15181 - protein, 15 aa, synthetic construct
GSPGPRAAATTKCDD

SEQ ID NO: 15182 - protein, 15 aa, synthetic construct
GSPKDSSCGAVGGSG

SEQ ID NO: 15183 - protein, 15 aa, synthetic construct
GSPLGGAGAVPGPRR

SEQ ID NO: 15184 - protein, 15 aa, synthetic construct
GSPLQLHLHLAAAGA

SEQ ID NO: 15185 - protein, 15 aa, synthetic construct
GSPPAARHPMWSPAP

SEQ ID NO: 15186 - protein, 15 aa, synthetic construct
GSPWLSKASLQAKEA

SEQ ID NO: 15187 - protein, 13 aa, synthetic construct
GSQAEKDFSAARG

SEQ ID NO: 15188 - protein, 13 aa, synthetic construct
GSQEEEAAEAVVL

SEQ ID NO: 15189 - protein, 14 aa, synthetic construct
GSQEYEELVSVSDL

SEQ ID NO: 15190 - protein, 15 aa, synthetic construct
GSQGGHPGDKHLLPL

SEQ ID NO: 15191 - protein, 13 aa, synthetic construct
GSQKECEQGRQGA

SEQ ID NO: 15192 - protein, 15 aa, synthetic construct
GSQPLAPAAAAAAAA

SEQ ID NO: 15193 - protein, 15 aa, synthetic construct
GSQQDPAAVAELSPA

SEQ ID NO: 15194 - protein, 15 aa, synthetic construct
GSQQPPARAARTPGP

SEQ ID NO: 15195 - protein, 12 aa, synthetic construct
GSQRASGRTRVS

SEQ ID NO: 15196 - protein, 15 aa, synthetic construct
GSQRGVQEMEGAMFE

SEQ ID NO: 15197 - protein, 15 aa, synthetic construct
GSRAAAAASTGPPGP

SEQ ID NO: 15198 - protein, 15 aa, synthetic construct
GSRAEARGAHSGAAP

SEQ ID NO: 15199 - protein, 15 aa, synthetic construct
GSRAGPDAEFPTRGR

SEQ ID NO: 15200 - protein, 15 aa, synthetic construct
GSRAGSSGVHAAPGS

SEQ ID NO: 15201 - protein, 15 aa, synthetic construct
GSRAYPAGPAPSPSG

SEQ ID NO: 15202 - protein, 15 aa, synthetic construct
GSRDSQVERSFGSHL

SEQ ID NO: 15203 - protein, 15 aa, synthetic construct
GSRGEGPLLLAGTRA

SEQ ID NO: 15204 - protein, 15 aa, synthetic construct
GSRGQCRKCPQQGGA

SEQ ID NO: 15205 - protein, 15 aa, synthetic construct
GSRGQGDDGSPGCGR

SEQ ID NO: 15206 - protein, 15 aa, synthetic construct
GSRGQQLHEEPPAPS

SEQ ID NO: 15207 - protein, 15 aa, synthetic construct
GSRGRASPGPGRMRP

SEQ ID NO: 15208 - protein, 15 aa, synthetic construct
GSRGRSTGTKSGLPE

SEQ ID NO: 15209 - protein, 15 aa, synthetic construct
GSRGSEPLRAQSGGA

SEQ ID NO: 15210 - protein, 15 aa, synthetic construct
GSRLGPRPAVARCHG

SEQ ID NO: 15211 - protein, 15 aa, synthetic construct
GSRMRRPLCPGTRGL

SEQ ID NO: 15212 - protein, 15 aa, synthetic construct
GSRNREQRGDWKEGQ

SEQ ID NO: 15213 - protein, 15 aa, synthetic construct
GSRPAQTRTRTQTRR

SEQ ID NO: 15214 - protein, 15 aa, synthetic construct
GSRPGGGGDGPGWIP

SEQ ID NO: 15215 - protein, 15 aa, synthetic construct
GSRRALAARAGASAG

SEQ ID NO: 15216 - protein, 15 aa, synthetic construct
GSRRLAARAAGARRA

SEQ ID NO: 15217 - protein, 15 aa, synthetic construct
GSRSKPSSSYACCRL

SEQ ID NO: 15218 - protein, 15 aa, synthetic construct
GSRVCELQNPAWEGG

SEQ ID NO: 15219 - protein, 15 aa, synthetic construct
GSSAAGQARAEQAAV

SEQ ID NO: 15220 - protein, 15 aa, synthetic construct
GSSAEPGVCRGGLPA

SEQ ID NO: 15221 - protein, 15 aa, synthetic construct
GSSAGAGAQRKRAKA

SEQ ID NO: 15222 - protein, 15 aa, synthetic construct
GSSAPSRRSGAPGAR

SEQ ID NO: 15223 - protein, 15 aa, synthetic construct
GSSASAVRPLGLLAD

SEQ ID NO: 15224 - protein, 15 aa, synthetic construct
GSSDWSYGLEKGSLG

SEQ ID NO: 15225 - protein, 15 aa, synthetic construct
GSSEGSKESAVSPRE

SEQ ID NO: 15226 - protein, 15 aa, synthetic construct
GSSGAAEVQAATRPG

SEQ ID NO: 15227 - protein, 15 aa, synthetic construct
GSSGARCGGCWGFPA

SEQ ID NO: 15228 - protein, 12 aa, synthetic construct
GSSGGKDQPAPN

SEQ ID NO: 15229 - protein, 15 aa, synthetic construct
GSSGQTAEENQRHRG

SEQ ID NO: 15230 - protein, 15 aa, synthetic construct
GSSKLSAGAAHPAGG

SEQ ID NO: 15231 - protein, 15 aa, synthetic construct
GSSNQMPAPRKISPA

SEQ ID NO: 15232 - protein, 15 aa, synthetic construct
GSSPGRRLRPREGRA

SEQ ID NO: 15233 - protein, 15 aa, synthetic construct
GSSPRAGAGPATGTP

SEQ ID NO: 15234 - protein, 15 aa, synthetic construct
GSSRAAACDIKGMHE

SEQ ID NO: 15235 - protein, 15 aa, synthetic construct
GSSRASSGRLPLPGA

SEQ ID NO: 15236 - protein, 15 aa, synthetic construct
GSSRGQPGFPHWPDI

SEQ ID NO: 15237 - protein, 15 aa, synthetic construct
GSSRHPSFASVPPAS

SEQ ID NO: 15238 - protein, 15 aa, synthetic construct
GSSRRLCARWESSCR

SEQ ID NO: 15239 - protein, 15 aa, synthetic construct
GSSRRYQDPSVPPAS

SEQ ID NO: 15240 - protein, 15 aa, synthetic construct
GSSRSLSFGSRLGWR

SEQ ID NO: 15241 - protein, 15 aa, synthetic construct
GSSSAGSRPGGAAGS

SEQ ID NO: 15242 - protein, 15 aa, synthetic construct
GSSSSRPGRGCRRPG

SEQ ID NO: 15243 - protein, 15 aa, synthetic construct
GSTAVRSSSQCDTSN

SEQ ID NO: 15244 - protein, 15 aa, synthetic construct
GSTEGAGVPLRGDAP

SEQ ID NO: 15245 - protein, 15 aa, synthetic construct
GSTRARPSVSRPRRG

SEQ ID NO: 15246 - protein, 15 aa, synthetic construct
GSTSDSRYQEFQPRE

SEQ ID NO: 15247 - protein, 15 aa, synthetic construct
GSTSRARSWPSPASE

SEQ ID NO: 15248 - protein, 15 aa, synthetic construct
GSTTSVPLEPSEEET

SEQ ID NO: 15249 - protein, 15 aa, synthetic construct
GSTVDPALPVASPAW

SEQ ID NO: 15250 - protein, 15 aa, synthetic construct
GSTWPEPAAARQSEE

SEQ ID NO: 15251 - protein, 14 aa, synthetic construct
GSVEELDGPAALRH

SEQ ID NO: 15252 - protein, 15 aa, synthetic construct
GSVGRAECGGRVGAA

SEQ ID NO: 15253 - protein, 15 aa, synthetic construct
GSVPAAGDLGGRKIP

SEQ ID NO: 15254 - protein, 15 aa, synthetic construct
GSVQQLQRQQQQQQR

SEQ ID NO: 15255 - protein, 15 aa, synthetic construct
GSVQRGHGARGRRRR

SEQ ID NO: 15256 - protein, 15 aa, synthetic construct
GSVRDGAGALGGGTG

SEQ ID NO: 15257 - protein, 15 aa, synthetic construct
GSVRLRQQPAPQLRR

SEQ ID NO: 15258 - protein, 15 aa, synthetic construct
GSVRPPQSARHGCER

SEQ ID NO: 15259 - protein, 15 aa, synthetic construct
GSVRRSRGGDCSPRQ

SEQ ID NO: 15260 - protein, 15 aa, synthetic construct
GSVRTDGAAAPAAPG

SEQ ID NO: 15261 - protein, 15 aa, synthetic construct
GSVSGSCSPEAAAGH

SEQ ID NO: 15262 - protein, 15 aa, synthetic construct
GSVTGSEPPYPGSGL

SEQ ID NO: 15263 - protein, 15 aa, synthetic construct
GSVTPSSFEEGAGRC

SEQ ID NO: 15264 - protein, 15 aa, synthetic construct
GSWGWAPSVRCALDP

SEQ ID NO: 15265 - protein, 15 aa, synthetic construct
GSWHPPLPGSNAPST

SEQ ID NO: 15266 - protein, 15 aa, synthetic construct
GSWQGPQELGGRAGE

SEQ ID NO: 15267 - protein, 13 aa, synthetic construct
GSWQPVAEPAQRA

SEQ ID NO: 15268 - protein, 15 aa, synthetic construct
GSYEANSSQVYRRQS

SEQ ID NO: 15269 - protein, 15 aa, synthetic construct
GSYSAPTSSSPPPPP

SEQ ID NO: 15270 - protein, 15 aa, synthetic construct
GTAAEQAAEPPEAGA

SEQ ID NO: 15271 - protein, 15 aa, synthetic construct
GTAAGQPGGTARPGS

SEQ ID NO: 15272 - protein, 15 aa, synthetic construct
GTAAQAPALSCPPPP

SEQ ID NO: 15273 - protein, 15 aa, synthetic construct
GTAAQRRQQCPSEKS

SEQ ID NO: 15274 - protein, 15 aa, synthetic construct
GTADFKHQWGEEEEP

SEQ ID NO: 15275 - protein, 15 aa, synthetic construct
GTADLPPGDNARGGR

SEQ ID NO: 15276 - protein, 14 aa, synthetic construct
GTADRQVNEHLREP

SEQ ID NO: 15277 - protein, 15 aa, synthetic construct
GTAGTAKSSTGISAT

SEQ ID NO: 15278 - protein, 15 aa, synthetic construct
GTAHFKHQWGEEEEP

SEQ ID NO: 15279 - protein, 15 aa, synthetic construct
GTANFQHQWGEDEEP

SEQ ID NO: 15280 - protein, 15 aa, synthetic construct
GTAPAAAAPPGPRLS

SEQ ID NO: 15281 - protein, 15 aa, synthetic construct
GTAPHGPRVPDPLPL

SEQ ID NO: 15282 - protein, 15 aa, synthetic construct
GTARGDGRVSGPVRP

SEQ ID NO: 15283 - protein, 15 aa, synthetic construct
GTARRPAPGSAPRPG

SEQ ID NO: 15284 - protein, 15 aa, synthetic construct
GTASPSASTTSTMAP

SEQ ID NO: 15285 - protein, 15 aa, synthetic construct
GTASSDHSFSSAQYL

SEQ ID NO: 15286 - protein, 15 aa, synthetic construct
GTATCSETTASCRTC

SEQ ID NO: 15287 - protein, 15 aa, synthetic construct
GTAWAQGSGSLSLPP

SEQ ID NO: 15288 - protein, 15 aa, synthetic construct
GTCAESPALAPAAGR

SEQ ID NO: 15289 - protein, 15 aa, synthetic construct
GTDCPPLLPPGPVGG

SEQ ID NO: 15290 - protein, 15 aa, synthetic construct
GTDCPPPGHQPRSPQ

SEQ ID NO: 15291 - protein, 12 aa, synthetic construct
GTDRSAEATDPG

SEQ ID NO: 15292 - protein, 15 aa, synthetic construct
GTELHQLPAGDPAQG

SEQ ID NO: 15293 - protein, 15 aa, synthetic construct
GTEVAAAAGGLGSTA

SEQ ID NO: 15294 - protein, 15 aa, synthetic construct
GTFRPSSNEDFPFHV

SEQ ID NO: 15295 - protein, 15 aa, synthetic construct
GTGAGGRHRGDALRV

SEQ ID NO: 15296 - protein, 15 aa, synthetic construct
GTGENETRFQVAAEF

SEQ ID NO: 15297 - protein, 15 aa, synthetic construct
GTGKANDTPFDPESK

SEQ ID NO: 15298 - protein, 15 aa, synthetic construct
GTGNTKNTSTGVAAV

SEQ ID NO: 15299 - protein, 15 aa, synthetic construct
GTGPGAPAPPPPALR

SEQ ID NO: 15300 - protein, 15 aa, synthetic construct
GTGQSRMLPPAAAAS

SEQ ID NO: 15301 - protein, 15 aa, synthetic construct
GTGRDLDPRKGGNLA

SEQ ID NO: 15302 - protein, 15 aa, synthetic construct
GTGSGDTQDEPRDHW

SEQ ID NO: 15303 - protein, 15 aa, synthetic construct
GTGSTDPGAGVGGRP

SEQ ID NO: 15304 - protein, 15 aa, synthetic construct
GTGWDSSHGARSVGG

SEQ ID NO: 15305 - protein, 15 aa, synthetic construct
GTHGADGTYGAHGTY

SEQ ID NO: 15306 - protein, 13 aa, synthetic construct
GTKADQRGLPCEE

SEQ ID NO: 15307 - protein, 15 aa, synthetic construct
GTKERREETCGCGCG

SEQ ID NO: 15308 - protein, 15 aa, synthetic construct
GTLGTKRPDRLERSS

SEQ ID NO: 15309 - protein, 15 aa, synthetic construct
GTLNTPGSERSLPIS

SEQ ID NO: 15310 - protein, 15 aa, synthetic construct
GTLQLQENYGGAVRQ

SEQ ID NO: 15311 - protein, 15 aa, synthetic construct
GTLRECHATCPGSGS

SEQ ID NO: 15312 - protein, 15 aa, synthetic construct
GTLRTSANPGTIHPF

SEQ ID NO: 15313 - protein, 15 aa, synthetic construct
GTMCCRCPRTRGSPT

SEQ ID NO: 15314 - protein, 15 aa, synthetic construct
GTPAAHPDLALDPDS

SEQ ID NO: 15315 - protein, 15 aa, synthetic construct
GTPAEPASLRERSEH

SEQ ID NO: 15316 - protein, 15 aa, synthetic construct
GTPAGPGGRAEAAVV

SEQ ID NO: 15317 - protein, 15 aa, synthetic construct
GTPDRPLGKEPVSVT

SEQ ID NO: 15318 - protein, 15 aa, synthetic construct
GTPPRTAAPPCGVHG

SEQ ID NO: 15319 - protein, 15 aa, synthetic construct
GTPRGQAEPGLPRGT

SEQ ID NO: 15320 - protein, 15 aa, synthetic construct
GTPRGVSVRAAGPGD

SEQ ID NO: 15321 - protein, 15 aa, synthetic construct
GTQDGPSGVCAGQDG

SEQ ID NO: 15322 - protein, 14 aa, synthetic construct
GTQEGERRNCEHQF

SEQ ID NO: 15323 - protein, 15 aa, synthetic construct
GTQKGEKGEVLGRSQ

SEQ ID NO: 15324 - protein, 15 aa, synthetic construct
GTQKPNSCFRISSHE

SEQ ID NO: 15325 - protein, 15 aa, synthetic construct
GTQSGVPPPPPPSSS

SEQ ID NO: 15326 - protein, 15 aa, synthetic construct
GTRDQVEPQTSGGLD

SEQ ID NO: 15327 - protein, 15 aa, synthetic construct
GTRLSCGQSGAGAAW

SEQ ID NO: 15328 - protein, 15 aa, synthetic construct
GTRNLWDPCLCSTQP

SEQ ID NO: 15329 - protein, 15 aa, synthetic construct
GTRRGLCSAGPSSVW

SEQ ID NO: 15330 - protein, 15 aa, synthetic construct
GTRRRMRAANTAGAF

SEQ ID NO: 15331 - protein, 15 aa, synthetic construct
GTRRRRRSGATGRRV

SEQ ID NO: 15332 - protein, 15 aa, synthetic construct
GTRRTWKPPGRALAA

SEQ ID NO: 15333 - protein, 15 aa, synthetic construct
GTRTATETRLDPEPK

SEQ ID NO: 15334 - protein, 15 aa, synthetic construct
GTRWGPEQQAERGEP

SEQ ID NO: 15335 - protein, 15 aa, synthetic construct
GTSAPAQLWPPKLAT

SEQ ID NO: 15336 - protein, 15 aa, synthetic construct
GTSGTRAFCEQVCRN

SEQ ID NO: 15337 - protein, 15 aa, synthetic construct
GTSRAVTAPVCGRGF

SEQ ID NO: 15338 - protein, 15 aa, synthetic construct
GTTGQLEEPAGATAS

SEQ ID NO: 15339 - protein, 15 aa, synthetic construct
GTTSGPWLRNRDSTS

SEQ ID NO: 15340 - protein, 15 aa, synthetic construct
GTVEAAESGWTGASG

SEQ ID NO: 15341 - protein, 15 aa, synthetic construct
GTVELAGGGRGGCGP

SEQ ID NO: 15342 - protein, 15 aa, synthetic construct
GTVRLARASLHPGSA

SEQ ID NO: 15343 - protein, 15 aa, synthetic construct
GTWAAPGAPGAPRAR

SEQ ID NO: 15344 - protein, 15 aa, synthetic construct
GVAAARSQRRGSRRV

SEQ ID NO: 15345 - protein, 15 aa, synthetic construct
GVAAIPELRGEAGDA

SEQ ID NO: 15346 - protein, 15 aa, synthetic construct
GVAAKFVCEEERGEG

SEQ ID NO: 15347 - protein, 15 aa, synthetic construct
GVADAADPPTGGVGR

SEQ ID NO: 15348 - protein, 15 aa, synthetic construct
GVAEALERRAGPLVR

SEQ ID NO: 15349 - protein, 15 aa, synthetic construct
GVAERGTNTPGARCA

SEQ ID NO: 15350 - protein, 15 aa, synthetic construct
GVAERPGVGAGVVQG

SEQ ID NO: 15351 - protein, 15 aa, synthetic construct
GVAGALVAAAWGRPV

SEQ ID NO: 15352 - protein, 15 aa, synthetic construct
GVAGEKRIGPAFKPS

SEQ ID NO: 15353 - protein, 15 aa, synthetic construct
GVAGTSGRVPAGAGG

SEQ ID NO: 15354 - protein, 15 aa, synthetic construct
GVAGVADPAPGGVGL

SEQ ID NO: 15355 - protein, 14 aa, synthetic construct
GVALQRGAAADGPG

SEQ ID NO: 15356 - protein, 15 aa, synthetic construct
GVANNDRPSGGRAPA

SEQ ID NO: 15357 - protein, 15 aa, synthetic construct
GVAPAAGAAAAGHTV

SEQ ID NO: 15358 - protein, 15 aa, synthetic construct
GVAPAEPHGARGGPR

SEQ ID NO: 15359 - protein, 13 aa, synthetic construct
GVAQGAGGPGSPG

SEQ ID NO: 15360 - protein, 15 aa, synthetic construct
GVARLEPARQHAPVQ

SEQ ID NO: 15361 - protein, 15 aa, synthetic construct
GVASAFSGATLLQLP

SEQ ID NO: 15362 - protein, 15 aa, synthetic construct
GVAVHHEGLLHRPLL

SEQ ID NO: 15363 - protein, 15 aa, synthetic construct
GVCAGVPPPVVLPVR

SEQ ID NO: 15364 - protein, 15 aa, synthetic construct
GVCARHNDPGRGAAG

SEQ ID NO: 15365 - protein, 15 aa, synthetic construct
GVCGALDSVSGTGGV

SEQ ID NO: 15366 - protein, 15 aa, synthetic construct
GVDPGSCRGGGGTAG

SEQ ID NO: 15367 - protein, 15 aa, synthetic construct
GVDRLQAELPEGGDP

SEQ ID NO: 15368 - protein, 15 aa, synthetic construct
GVEARAKPRTLRAAA

SEQ ID NO: 15369 - protein, 15 aa, synthetic construct
GVEDRFETVDVAADH

SEQ ID NO: 15370 - protein, 15 aa, synthetic construct
GVETAGRAGDVPSTD

SEQ ID NO: 15371 - protein, 15 aa, synthetic construct
GVETGAHRASEGPHG

SEQ ID NO: 15372 - protein, 15 aa, synthetic construct
GVFKGTVEREAFSPH

SEQ ID NO: 15373 - protein, 15 aa, synthetic construct
GVFRGAHLPGAAGQP

SEQ ID NO: 15374 - protein, 15 aa, synthetic construct
GVGADRAPSPAPGPR

SEQ ID NO: 15375 - protein, 15 aa, synthetic construct
GVGALLQQNPGHRVE

SEQ ID NO: 15376 - protein, 15 aa, synthetic construct
GVGARARGAGHRPEL

SEQ ID NO: 15377 - protein, 15 aa, synthetic construct
GVGARGSAALAEPGP

SEQ ID NO: 15378 - protein, 15 aa, synthetic construct
GVGDACAGRAPAGAD

SEQ ID NO: 15379 - protein, 15 aa, synthetic construct
GVGELPGGREGGGGG

SEQ ID NO: 15380 - protein, 15 aa, synthetic construct
GVGGAGCWRCGGGAG

SEQ ID NO: 15381 - protein, 15 aa, synthetic construct
GVGGESRGLEEGLAA

SEQ ID NO: 15382 - protein, 15 aa, synthetic construct
GVGGGEAAVLAPRSS

SEQ ID NO: 15383 - protein, 12 aa, synthetic construct
GVGGVGAEDPDS

SEQ ID NO: 15384 - protein, 13 aa, synthetic construct
GVGKPAGTGGPRA

SEQ ID NO: 15385 - protein, 15 aa, synthetic construct
GVGLPVGSDLAAGRL

SEQ ID NO: 15386 - protein, 15 aa, synthetic construct
GVGLQDWPVHPQQRP

SEQ ID NO: 15387 - protein, 15 aa, synthetic construct
GVGPAGLAPGLGAAG

SEQ ID NO: 15388 - protein, 15 aa, synthetic construct
GVGPGLPGTGRAPDS

SEQ ID NO: 15389 - protein, 15 aa, synthetic construct
GVGPGSRGTPRAGAK

SEQ ID NO: 15390 - protein, 15 aa, synthetic construct
GVGRGDRKVDGGGDA

SEQ ID NO: 15391 - protein, 15 aa, synthetic construct
GVGRLLRGGAAAPDE

SEQ ID NO: 15392 - protein, 15 aa, synthetic construct
GVGVGGAGGGRAGLR

SEQ ID NO: 15393 - protein, 15 aa, synthetic construct
GVHAGRGHRDSRGAT

SEQ ID NO: 15394 - protein, 15 aa, synthetic construct
GVHGEDHGGRPAEEP

SEQ ID NO: 15395 - protein, 15 aa, synthetic construct
GVHGGGDRGFALGGH

SEQ ID NO: 15396 - protein, 15 aa, synthetic construct
GVHGSGEPEPEKRHS

SEQ ID NO: 15397 - protein, 12 aa, synthetic construct
GVHHGRAAEQMD

SEQ ID NO: 15398 - protein, 15 aa, synthetic construct
GVHLTEELPRPGARP

SEQ ID NO: 15399 - protein, 15 aa, synthetic construct
GVHVPSAARGASLPA

SEQ ID NO: 15400 - protein, 15 aa, synthetic construct
GVHVRGRRGSPPPAG

SEQ ID NO: 15401 - protein, 15 aa, synthetic construct
GVKDFFGQCPIYGAI

SEQ ID NO: 15402 - protein, 15 aa, synthetic construct
GVLAAVGPGSLSSPG

SEQ ID NO: 15403 - protein, 15 aa, synthetic construct
GVLEALGASRRRGPL

SEQ ID NO: 15404 - protein, 15 aa, synthetic construct
GVLFRRQKPEVVSRT

SEQ ID NO: 15405 - protein, 15 aa, synthetic construct
GVLGLARRGSPPAVG

SEQ ID NO: 15406 - protein, 15 aa, synthetic construct
GVLGPAVASPAVHRA

SEQ ID NO: 15407 - protein, 15 aa, synthetic construct
GVLGSEPGPAAVHAG

SEQ ID NO: 15408 - protein, 15 aa, synthetic construct
GVLGVGTLPDPSAKG

SEQ ID NO: 15409 - protein, 15 aa, synthetic construct
GVLHSAESRSGFWAC

SEQ ID NO: 15410 - protein, 15 aa, synthetic construct
GVLPPLPGSGLRARS

SEQ ID NO: 15411 - protein, 15 aa, synthetic construct
GVLPRGRMEQTHREV

SEQ ID NO: 15412 - protein, 15 aa, synthetic construct
GVLQQPERAEDEEGK

SEQ ID NO: 15413 - protein, 12 aa, synthetic construct
GVLRGEPDPKQG

SEQ ID NO: 15414 - protein, 15 aa, synthetic construct
GVLRLRPDSGREASD

SEQ ID NO: 15415 - protein, 15 aa, synthetic construct
GVLVSHASLQASHPE

SEQ ID NO: 15416 - protein, 15 aa, synthetic construct
GVNGLPDSHAGSTDS

SEQ ID NO: 15417 - protein, 15 aa, synthetic construct
GVPAGAAAGGLRAGR

SEQ ID NO: 15418 - protein, 15 aa, synthetic construct
GVPARGRGRGRHPHA

SEQ ID NO: 15419 - protein, 15 aa, synthetic construct
GVPELAAGVPADPTG

SEQ ID NO: 15420 - protein, 15 aa, synthetic construct
GVPEWIRPRGPTSTA

SEQ ID NO: 15421 - protein, 15 aa, synthetic construct
GVPFSLSIQSVHSLA

SEQ ID NO: 15422 - protein, 15 aa, synthetic construct
GVPGAAAAPAGRVGR

SEQ ID NO: 15423 - protein, 15 aa, synthetic construct
GVPGGAKRCKDIFDH

SEQ ID NO: 15424 - protein, 14 aa, synthetic construct
GVPGHGAGPPGADL

SEQ ID NO: 15425 - protein, 15 aa, synthetic construct
GVPGLEAPAATAAPA

SEQ ID NO: 15426 - protein, 15 aa, synthetic construct
GVPGPGSPGPQVCGP

SEQ ID NO: 15427 - protein, 15 aa, synthetic construct
GVPGRAAPAGLGQLA

SEQ ID NO: 15428 - protein, 15 aa, synthetic construct
GVPGTVHGAAGAAGR

SEQ ID NO: 15429 - protein, 15 aa, synthetic construct
GVPQRGSAAGGGGRG

SEQ ID NO: 15430 - protein, 15 aa, synthetic construct
GVPRDRHLDSGVSAP

SEQ ID NO: 15431 - protein, 15 aa, synthetic construct
GVPRSSAGREASASP

SEQ ID NO: 15432 - protein, 15 aa, synthetic construct
GVPTGIDTEPPEEDL

SEQ ID NO: 15433 - protein, 15 aa, synthetic construct
GVPVLRALPGGLQNP

SEQ ID NO: 15434 - protein, 15 aa, synthetic construct
GVPVRCGRAVPGADH

SEQ ID NO: 15435 - protein, 15 aa, synthetic construct
GVPVRLLDVLPGRAA

SEQ ID NO: 15436 - protein, 15 aa, synthetic construct
GVQAHVAPARTPERP

SEQ ID NO: 15437 - protein, 14 aa, synthetic construct
GVQHGPGDDPGGFS

SEQ ID NO: 15438 - protein, 15 aa, synthetic construct
GVQPRTGGDSAHGTA

SEQ ID NO: 15439 - protein, 15 aa, synthetic construct
GVQPVADPVPRAVGE

SEQ ID NO: 15440 - protein, 15 aa, synthetic construct
GVQREGHPGPSGEEA

SEQ ID NO: 15441 - protein, 15 aa, synthetic construct
GVRAAGSTDCHGAAA

SEQ ID NO: 15442 - protein, 15 aa, synthetic construct
GVRAGRGALAGAAQG

SEQ ID NO: 15443 - protein, 15 aa, synthetic construct
GVRARECSHAEETGV

SEQ ID NO: 15444 - protein, 15 aa, synthetic construct
GVRDAERGGEGVHRA

SEQ ID NO: 15445 - protein, 15 aa, synthetic construct
GVRDRTRARHAPGEE

SEQ ID NO: 15446 - protein, 15 aa, synthetic construct
GVREPGQASQDRGGG

SEQ ID NO: 15447 - protein, 15 aa, synthetic construct
GVRGAAHRVPAPAAR

SEQ ID NO: 15448 - protein, 15 aa, synthetic construct
GVRGDAEAAHGVRGG

SEQ ID NO: 15449 - protein, 15 aa, synthetic construct
GVRGPVQLSGYRERR

SEQ ID NO: 15450 - protein, 15 aa, synthetic construct
GVRNAAIASSGPGGG

SEQ ID NO: 15451 - protein, 15 aa, synthetic construct
GVRPAGGRGVRRLHP

SEQ ID NO: 15452 - protein, 15 aa, synthetic construct
GVRPGRPEPDQHLPA

SEQ ID NO: 15453 - protein, 15 aa, synthetic construct
GVRQARPAHRAAGAA

SEQ ID NO: 15454 - protein, 15 aa, synthetic construct
GVRQPNGRGGNFQND

SEQ ID NO: 15455 - protein, 15 aa, synthetic construct
GVRRAQGGLGGLAGP

SEQ ID NO: 15456 - protein, 15 aa, synthetic construct
GVRRDLPGGILPAQR

SEQ ID NO: 15457 - protein, 15 aa, synthetic construct
GVRRQQEGGPGATSA

SEQ ID NO: 15458 - protein, 15 aa, synthetic construct
GVRSHSEKDSGFRPA

SEQ ID NO: 15459 - protein, 15 aa, synthetic construct
GVRSLDAPRCLDLDR

SEQ ID NO: 15460 - protein, 15 aa, synthetic construct
GVSAGPETRAAADHR

SEQ ID NO: 15461 - protein, 15 aa, synthetic construct
GVSAPEPTPLRTGLG

SEQ ID NO: 15462 - protein, 15 aa, synthetic construct
GVSCPFSLCQPPARG

SEQ ID NO: 15463 - protein, 14 aa, synthetic construct
GVSEREVCPQEPSE

SEQ ID NO: 15464 - protein, 15 aa, synthetic construct
GVSEVWRLPKLFADS

SEQ ID NO: 15465 - protein, 15 aa, synthetic construct
GVSGFRWIQAERGFF

SEQ ID NO: 15466 - protein, 15 aa, synthetic construct
GVSPKHVGRAECPGK

SEQ ID NO: 15467 - protein, 13 aa, synthetic construct
GVSPTFPQPEVAR

SEQ ID NO: 15468 - protein, 15 aa, synthetic construct
GVSRARAAPTGAAAT

SEQ ID NO: 15469 - protein, 15 aa, synthetic construct
GVSRPHCASHCDERV

SEQ ID NO: 15470 - protein, 15 aa, synthetic construct
GVSSGGPDCDRDEAS

SEQ ID NO: 15471 - protein, 15 aa, synthetic construct
GVSSRPASGRHRRQR

SEQ ID NO: 15472 - protein, 13 aa, synthetic construct
GVSTDRTDAELAR

SEQ ID NO: 15473 - protein, 15 aa, synthetic construct
GVSTPELQRLHCSGL

SEQ ID NO: 15474 - protein, 15 aa, synthetic construct
GVSWDYSDRQLLWSQ

SEQ ID NO: 15475 - protein, 15 aa, synthetic construct
GVTCTTQAPPVALPT

SEQ ID NO: 15476 - protein, 15 aa, synthetic construct
GVTDGAAHICGPGQG

SEQ ID NO: 15477 - protein, 15 aa, synthetic construct
GVVAGSAAQDGPGEP

SEQ ID NO: 15478 - protein, 15 aa, synthetic construct
GVVLAASTAPAALGL

SEQ ID NO: 15479 - protein, 15 aa, synthetic construct
GVVQEASRREGGGRD

SEQ ID NO: 15480 - protein, 15 aa, synthetic construct
GVVQMTLNPSCRPQG

SEQ ID NO: 15481 - protein, 15 aa, synthetic construct
GVVSGAARARDGPSG

SEQ ID NO: 15482 - protein, 15 aa, synthetic construct
GVVSGSADSCQVRGC

SEQ ID NO: 15483 - protein, 15 aa, synthetic construct
GVWAAPCPPLDPPWQ

SEQ ID NO: 15484 - protein, 15 aa, synthetic construct
GVWAEPEGGGRTRRG

SEQ ID NO: 15485 - protein, 15 aa, synthetic construct
GVWMHRAGERDRGLG

SEQ ID NO: 15486 - protein, 15 aa, synthetic construct
GVWQESPGSLRDLRG

SEQ ID NO: 15487 - protein, 15 aa, synthetic construct
GVWYTSNPCMRWERR

SEQ ID NO: 15488 - protein, 15 aa, synthetic construct
GVYPEEAAGAAAAAL

SEQ ID NO: 15489 - protein, 15 aa, synthetic construct
GWAAFEPSGQAAAAA

SEQ ID NO: 15490 - protein, 15 aa, synthetic construct
GWAPGQCRAVEARAA

SEQ ID NO: 15491 - protein, 15 aa, synthetic construct
GWARPPPSSQPETEA

SEQ ID NO: 15492 - protein, 15 aa, synthetic construct
GWAWETPTLPPVPAQ

SEQ ID NO: 15493 - protein, 15 aa, synthetic construct
GWCWMHRDVVLALGD

SEQ ID NO: 15494 - protein, 15 aa, synthetic construct
GWDGQWQPEDREAVA

SEQ ID NO: 15495 - protein, 15 aa, synthetic construct
GWEGDGDVEFGNWRG

SEQ ID NO: 15496 - protein, 15 aa, synthetic construct
GWGCVGPEPGPGGSR

SEQ ID NO: 15497 - protein, 15 aa, synthetic construct
GWGGSDSYCCLGLLP

SEQ ID NO: 15498 - protein, 15 aa, synthetic construct
GWGHRSVEANVSGVN

SEQ ID NO: 15499 - protein, 15 aa, synthetic construct
GWGPALLLQPPASSL

SEQ ID NO: 15500 - protein, 15 aa, synthetic construct
GWGPRDQRCLAEPLQ

SEQ ID NO: 15501 - protein, 15 aa, synthetic construct
GWGPSSGPGFGSGLG

SEQ ID NO: 15502 - protein, 15 aa, synthetic construct
GWGWSMCWEGGPPVQ

SEQ ID NO: 15503 - protein, 15 aa, synthetic construct
GWLPTGEATAELGTR

SEQ ID NO: 15504 - protein, 15 aa, synthetic construct
GWLYAQYPGQISPLG

SEQ ID NO: 15505 - protein, 14 aa, synthetic construct
GWMEKATPVSRQSL

SEQ ID NO: 15506 - protein, 15 aa, synthetic construct
GWNCPARLCPRCRRM

SEQ ID NO: 15507 - protein, 15 aa, synthetic construct
GWPKTARKRGVKESM

SEQ ID NO: 15508 - protein, 15 aa, synthetic construct
GWPPGRGLGGGGPAA

SEQ ID NO: 15509 - protein, 15 aa, synthetic construct
GWPRLCAAAASAVGA

SEQ ID NO: 15510 - protein, 15 aa, synthetic construct
GWPSGRHPCCLLGTP

SEQ ID NO: 15511 - protein, 15 aa, synthetic construct
GWRARGRPRGGGFAS

SEQ ID NO: 15512 - protein, 15 aa, synthetic construct
GWRETDNMGMVTCCK

SEQ ID NO: 15513 - protein, 15 aa, synthetic construct
GWSRELARPSNGSIS

SEQ ID NO: 15514 - protein, 12 aa, synthetic construct
GWTCHPEPHEAD

SEQ ID NO: 15515 - protein, 15 aa, synthetic construct
GYDCGGGAACFCGAL

SEQ ID NO: 15516 - protein, 15 aa, synthetic construct
GYDGGPGGTQPGTDL

SEQ ID NO: 15517 - protein, 13 aa, synthetic construct
GYGRTLAGGGLLG

SEQ ID NO: 15518 - protein, 15 aa, synthetic construct
GYKGAEHERPPGTRA

SEQ ID NO: 15519 - protein, 15 aa, synthetic construct
GYLACGAERGAGGWG

SEQ ID NO: 15520 - protein, 15 aa, synthetic construct
GYLQPGERETTRSGR

SEQ ID NO: 15521 - protein, 15 aa, synthetic construct
GYPGCKQARSGSRQW

SEQ ID NO: 15522 - protein, 15 aa, synthetic construct
GYPGTPRSRARRRPW

SEQ ID NO: 15523 - protein, 15 aa, synthetic construct
GYTVKAQPTAGRPKA

SEQ ID NO: 15524 - protein, 15 aa, synthetic construct
GYVEAGRPTDRRPKA

SEQ ID NO: 15525 - protein, 15 aa, synthetic construct
HAAARAAGAPALPGH

SEQ ID NO: 15526 - protein, 15 aa, synthetic construct
HAAGGRMQPLQGPGR

SEQ ID NO: 15527 - protein, 15 aa, synthetic construct
HAAGLEGLGHPAVQV

SEQ ID NO: 15528 - protein, 15 aa, synthetic construct
HAAHQGGGQGQHRAR

SEQ ID NO: 15529 - protein, 15 aa, synthetic construct
HAALGQAEQDSDPQA

SEQ ID NO: 15530 - protein, 15 aa, synthetic construct
HAARLAGGARRPQPL

SEQ ID NO: 15531 - protein, 15 aa, synthetic construct
HAGGHLPAGGLHHRE

SEQ ID NO: 15532 - protein, 15 aa, synthetic construct
HAGRRVEAAAGPPGQ

SEQ ID NO: 15533 - protein, 15 aa, synthetic construct
HAPAHPGQAGDGALG

SEQ ID NO: 15534 - protein, 15 aa, synthetic construct
HAPGPLGLAGGAAAH

SEQ ID NO: 15535 - protein, 15 aa, synthetic construct
HAPLRAWVPTAARAA

SEQ ID NO: 15536 - protein, 15 aa, synthetic construct
HAPPDVPLDPAHAAR

SEQ ID NO: 15537 - protein, 15 aa, synthetic construct
HASRPLSSQRRAART

SEQ ID NO: 15538 - protein, 15 aa, synthetic construct
HCAQNAGRPGDEPES

SEQ ID NO: 15539 - protein, 15 aa, synthetic construct
HCPEDAGEHPDTQQS

SEQ ID NO: 15540 - protein, 15 aa, synthetic construct
HCPKFVGDAPPSLQP

SEQ ID NO: 15541 - protein, 15 aa, synthetic construct
HCRPEELSGASHTPG

SEQ ID NO: 15542 - protein, 15 aa, synthetic construct
HDDDHDGRDPDRRSP

SEQ ID NO: 15543 - protein, 15 aa, synthetic construct
HDHRGQDQPEAGVGL

SEQ ID NO: 15544 - protein, 15 aa, synthetic construct
HDPGLRAHLPDRQAS

SEQ ID NO: 15545 - protein, 15 aa, synthetic construct
HDPLPAAAAAPAPGR

SEQ ID NO: 15546 - protein, 15 aa, synthetic construct
HDPRGGRGSGDAGSR

SEQ ID NO: 15547 - protein, 15 aa, synthetic construct
HDVALPEPGREGSGR

SEQ ID NO: 15548 - protein, 15 aa, synthetic construct
HEELQRAASRAARGH

SEQ ID NO: 15549 - protein, 15 aa, synthetic construct
HERATAADLQPEPAG

SEQ ID NO: 15550 - protein, 15 aa, synthetic construct
HGAADSSHRGEPEPA

SEQ ID NO: 15551 - protein, 15 aa, synthetic construct
HGAEPAVGLAGQRGR

SEQ ID NO: 15552 - protein, 15 aa, synthetic construct
HGAERGRPERRALPS

SEQ ID NO: 15553 - protein, 15 aa, synthetic construct
HGDQPRRGGTGQEPA

SEQ ID NO: 15554 - protein, 15 aa, synthetic construct
HGEEQGDPGRPRQQE

SEQ ID NO: 15555 - protein, 15 aa, synthetic construct
HGEEQGHAGRARQQE

SEQ ID NO: 15556 - protein, 15 aa, synthetic construct
HGGALIPRQPPAAAL

SEQ ID NO: 15557 - protein, 15 aa, synthetic construct
HGGGAEAPARGPAGV

SEQ ID NO: 15558 - protein, 15 aa, synthetic construct
HGGGGPVWPGGAAVA

SEQ ID NO: 15559 - protein, 15 aa, synthetic construct
HGGICDQRSEPRATG

SEQ ID NO: 15560 - protein, 15 aa, synthetic construct
HGGLWGAFAGGGDPV

SEQ ID NO: 15561 - protein, 15 aa, synthetic construct
HGGRRHHPAASNRRS

SEQ ID NO: 15562 - protein, 15 aa, synthetic construct
HGHQLDVADAALARG

SEQ ID NO: 15563 - protein, 15 aa, synthetic construct
HGPGGRLGPGPAAGP

SEQ ID NO: 15564 - protein, 15 aa, synthetic construct
HGPLGGRVHQPGPEL

SEQ ID NO: 15565 - protein, 15 aa, synthetic construct
HGPRSAQLPARPRTL

SEQ ID NO: 15566 - protein, 15 aa, synthetic construct
HGPVEEEERAPEAPR

SEQ ID NO: 15567 - protein, 15 aa, synthetic construct
HGQLGPRPPGLRPQH

SEQ ID NO: 15568 - protein, 15 aa, synthetic construct
HGRRPAPRAPPELAP

SEQ ID NO: 15569 - protein, 15 aa, synthetic construct
HHGHPAEPQEAADVE

SEQ ID NO: 15570 - protein, 15 aa, synthetic construct
HHVGSPPENTHVFFS

SEQ ID NO: 15571 - protein, 15 aa, synthetic construct
HILRDLDRQRPPKPG

SEQ ID NO: 15572 - protein, 15 aa, synthetic construct
HKHDPQGPSDHLHPA

SEQ ID NO: 15573 - protein, 15 aa, synthetic construct
HLCPGLCFADQPRWF

SEQ ID NO: 15574 - protein, 15 aa, synthetic construct
HLEIPEALGAAPPNA

SEQ ID NO: 15575 - protein, 15 aa, synthetic construct
HLELGSQFQRYQEPA

SEQ ID NO: 15576 - protein, 15 aa, synthetic construct
HLGAAAGQGGARELA

SEQ ID NO: 15577 - protein, 15 aa, synthetic construct
HLGEAGAGGSVLDER

SEQ ID NO: 15578 - protein, 15 aa, synthetic construct
HLGPPGHGGEGGPEH

SEQ ID NO: 15579 - protein, 15 aa, synthetic construct
HLHDLGRQQPVPAHH

SEQ ID NO: 15580 - protein, 15 aa, synthetic construct
HLLCCLCHPDVSEPV

SEQ ID NO: 15581 - protein, 15 aa, synthetic construct
HLLLWLSHTDVFRFH

SEQ ID NO: 15582 - protein, 15 aa, synthetic construct
HLLQDHLLEAHHCDH

SEQ ID NO: 15583 - protein, 15 aa, synthetic construct
HLPGSAVRPAERPLA

SEQ ID NO: 15584 - protein, 15 aa, synthetic construct
HLPPHSVWEPGDDVA

SEQ ID NO: 15585 - protein, 15 aa, synthetic construct
HLPQQNAGTAGPGAA

SEQ ID NO: 15586 - protein, 15 aa, synthetic construct
HLQDYRHGAGEAEAH

SEQ ID NO: 15587 - protein, 15 aa, synthetic construct
HLQGADPLRGHSLHH

SEQ ID NO: 15588 - protein, 15 aa, synthetic construct
HLRADPRVPQGQPVH

SEQ ID NO: 15589 - protein, 15 aa, synthetic construct
HLSAWPDSEIRAHLQ

SEQ ID NO: 15590 - protein, 15 aa, synthetic construct
HLTRLPLPAAPQAPL

SEQ ID NO: 15591 - protein, 15 aa, synthetic construct
HPAAAVPEQVLPSVL

SEQ ID NO: 15592 - protein, 15 aa, synthetic construct
HPAAELNADGHQSHL

SEQ ID NO: 15593 - protein, 15 aa, synthetic construct
HPAASPAAASPAPPS

SEQ ID NO: 15594 - protein, 15 aa, synthetic construct
HPACLWPAVPAAGAS

SEQ ID NO: 15595 - protein, 15 aa, synthetic construct
HPAEAARESARTLSP

SEQ ID NO: 15596 - protein, 15 aa, synthetic construct
HPARAAGQSGQAAPA

SEQ ID NO: 15597 - protein, 15 aa, synthetic construct
HPARLQPRFRLPPRH

SEQ ID NO: 15598 - protein, 15 aa, synthetic construct
HPARRRLLGGHRRLP

SEQ ID NO: 15599 - protein, 15 aa, synthetic construct
HPAVAEDFRPGCQRG

SEQ ID NO: 15600 - protein, 15 aa, synthetic construct
HPDGTLQTIQTSNGQ

SEQ ID NO: 15601 - protein, 15 aa, synthetic construct
HPEREGDHAKPERPP

SEQ ID NO: 15602 - protein, 15 aa, synthetic construct
HPGAPRGRPARALGP

SEQ ID NO: 15603 - protein, 15 aa, synthetic construct
HPGGADCGSLRERGP

SEQ ID NO: 15604 - protein, 15 aa, synthetic construct
HPGGGGESGPAQGRD

SEQ ID NO: 15605 - protein, 15 aa, synthetic construct
HPGLAGAGARAGGRR

SEQ ID NO: 15606 - protein, 15 aa, synthetic construct
HPGQAELLHRQPLAL

SEQ ID NO: 15607 - protein, 15 aa, synthetic construct
HPGQPAARVPGGAQP

SEQ ID NO: 15608 - protein, 15 aa, synthetic construct
HPHPHRGHQRRRAAT

SEQ ID NO: 15609 - protein, 15 aa, synthetic construct
HPHQQDLQGAGGGPD

SEQ ID NO: 15610 - protein, 15 aa, synthetic construct
HPHSHPPAGAGCQPD

SEQ ID NO: 15611 - protein, 15 aa, synthetic construct
HPKPGTAAAQPGCRR

SEQ ID NO: 15612 - protein, 15 aa, synthetic construct
HPLQPRQPPAAQEEA

SEQ ID NO: 15613 - protein, 15 aa, synthetic construct
HPLRARGGLEVGSQH

SEQ ID NO: 15614 - protein, 15 aa, synthetic construct
HPPGQPRRLERAAHR

SEQ ID NO: 15615 - protein, 15 aa, synthetic construct
HPPPAFPRLSGTAPR

SEQ ID NO: 15616 - protein, 15 aa, synthetic construct
HPQAVGHPAASPAAA

SEQ ID NO: 15617 - protein, 15 aa, synthetic construct
HPQPGFGSQHARLSL

SEQ ID NO: 15618 - protein, 15 aa, synthetic construct
HPQSVPHGAGPQERV

SEQ ID NO: 15619 - protein, 15 aa, synthetic construct
HPRPARRGCRAPSCR

SEQ ID NO: 15620 - protein, 15 aa, synthetic construct
HPRPVLPPAASGSVR

SEQ ID NO: 15621 - protein, 15 aa, synthetic construct
HPRQGCHHADVAECS

SEQ ID NO: 15622 - protein, 15 aa, synthetic construct
HPRSAPCRAPGSPGS

SEQ ID NO: 15623 - protein, 15 aa, synthetic construct
HPRWQCCCHPGARGR

SEQ ID NO: 15624 - protein, 15 aa, synthetic construct
HPSGQGAAARPAGSG

SEQ ID NO: 15625 - protein, 15 aa, synthetic construct
HPWAPSGRAVRGAGG

SEQ ID NO: 15626 - protein, 15 aa, synthetic construct
HPWEVWQGDPPLPNR

SEQ ID NO: 15627 - protein, 15 aa, synthetic construct
HQATQGPWAARQGPL

SEQ ID NO: 15628 - protein, 15 aa, synthetic construct
HQDPLVRQHRQRAGA

SEQ ID NO: 15629 - protein, 15 aa, synthetic construct
HQKVPPRAPRPAAGD

SEQ ID NO: 15630 - protein, 15 aa, synthetic construct
HQLAPGPLSAAPPGG

SEQ ID NO: 15631 - protein, 15 aa, synthetic construct
HQLATAGQPAADSLE

SEQ ID NO: 15632 - protein, 15 aa, synthetic construct
HQLRSALAPDSPGLA

SEQ ID NO: 15633 - protein, 15 aa, synthetic construct
HQPDNGGGGRAFAGA

SEQ ID NO: 15634 - protein, 15 aa, synthetic construct
HQPGHPGPHVAPPAQ

SEQ ID NO: 15635 - protein, 15 aa, synthetic construct
HQREGAAAGPQRPLR

SEQ ID NO: 15636 - protein, 15 aa, synthetic construct
HQRGDRATASSGQEG

SEQ ID NO: 15637 - protein, 15 aa, synthetic construct
HQSPGGGEDQDAVAR

SEQ ID NO: 15638 - protein, 15 aa, synthetic construct
HQSQWEGPGARGAGD

SEQ ID NO: 15639 - protein, 15 aa, synthetic construct
HRAAHRGCGQEPGGA

SEQ ID NO: 15640 - protein, 15 aa, synthetic construct
HRAQPAVGAAPGGHP

SEQ ID NO: 15641 - protein, 15 aa, synthetic construct
HRDAGLLRERPAAGE

SEQ ID NO: 15642 - protein, 15 aa, synthetic construct
HRGRRPDPADSSTAG

SEQ ID NO: 15643 - protein, 15 aa, synthetic construct
HRGSSWPPRQRAKAL

SEQ ID NO: 15644 - protein, 15 aa, synthetic construct
HRLDSETPDHDQRVR

SEQ ID NO: 15645 - protein, 15 aa, synthetic construct
HRLGLGQEDNRQARD

SEQ ID NO: 15646 - protein, 15 aa, synthetic construct
HRPQDAGQSHTRDSD

SEQ ID NO: 15647 - protein, 15 aa, synthetic construct
HRRGGADVAGAGARA

SEQ ID NO: 15648 - protein, 15 aa, synthetic construct
HRRGRRQPHGAAEAQ

SEQ ID NO: 15649 - protein, 15 aa, synthetic construct
HRRLPGLPAVQAVYQ

SEQ ID NO: 15650 - protein, 15 aa, synthetic construct
HRRRSSRRSRRSRPP

SEQ ID NO: 15651 - protein, 15 aa, synthetic construct
HRVQQSAPKSRKQWE

SEQ ID NO: 15652 - protein, 15 aa, synthetic construct
HSASHQGRTDSPGAH

SEQ ID NO: 15653 - protein, 15 aa, synthetic construct
HSFRPERSSDNSRDD

SEQ ID NO: 15654 - protein, 15 aa, synthetic construct
HSHMCTHISMCVCQC

SEQ ID NO: 15655 - protein, 15 aa, synthetic construct
HSPAAAAGDKPPRPR

SEQ ID NO: 15656 - protein, 15 aa, synthetic construct
HSQDRTAGTGSPAGP

SEQ ID NO: 15657 - protein, 15 aa, synthetic construct
HSQVPSQVPHTEVPP

SEQ ID NO: 15658 - protein, 15 aa, synthetic construct
HSRISSSSRRHRRRT

SEQ ID NO: 15659 - protein, 15 aa, synthetic construct
HSSGFVSPPKSKKPP

SEQ ID NO: 15660 - protein, 15 aa, synthetic construct
HSSGSFPAPRASTAR

SEQ ID NO: 15661 - protein, 15 aa, synthetic construct
HSTMWDSILQIQEEL

SEQ ID NO: 15662 - protein, 15 aa, synthetic construct
HTDARARRVHGAGGD

SEQ ID NO: 15663 - protein, 15 aa, synthetic construct
HTRRAALRSLRPARR

SEQ ID NO: 15664 - protein, 15 aa, synthetic construct
HVLHCLHPEPVRHQR

SEQ ID NO: 15665 - protein, 15 aa, synthetic construct
HVPRGPRARHPAGGG

SEQ ID NO: 15666 - protein, 15 aa, synthetic construct
HYARELALRPAWGEP

SEQ ID NO: 15667 - protein, 15 aa, synthetic construct
HYSQNAGELPRKEEY

SEQ ID NO: 15668 - protein, 15 aa, synthetic construct
IAPGVGLRDDGNGGS

SEQ ID NO: 15669 - protein, 15 aa, synthetic construct
IAQPVSSPPAPAPCA

SEQ ID NO: 15670 - protein, 15 aa, synthetic construct
IFISTTVENTPVPGI

SEQ ID NO: 15671 - protein, 15 aa, synthetic construct
IFPVPRVRSGSLRLQ

SEQ ID NO: 15672 - protein, 15 aa, synthetic construct
IFSLPQSSGHHICGV

SEQ ID NO: 15673 - protein, 15 aa, synthetic construct
IFSNVRDSVHSLWAV

SEQ ID NO: 15674 - protein, 15 aa, synthetic construct
IGAPCSQGLGREGRL

SEQ ID NO: 15675 - protein, 15 aa, synthetic construct
IGRPAPLQRVGGRPR

SEQ ID NO: 15676 - protein, 15 aa, synthetic construct
IGRPKRGRLQLRDDD

SEQ ID NO: 15677 - protein, 15 aa, synthetic construct
IGRRPRRGQGRRALP

SEQ ID NO: 15678 - protein, 15 aa, synthetic construct
IHHQQHGSEKPNSYF

SEQ ID NO: 15679 - protein, 15 aa, synthetic construct
IKADGIGVGDLHSGT

SEQ ID NO: 15680 - protein, 15 aa, synthetic construct
IKSSRAASRRPTSSR

SEQ ID NO: 15681 - protein, 15 aa, synthetic construct
ILPPGAATRRPGPAA

SEQ ID NO: 15682 - protein, 15 aa, synthetic construct
IPDEEKAHPQEATAQ

SEQ ID NO: 15683 - protein, 15 aa, synthetic construct
IPERPGPEQHPWEEG

SEQ ID NO: 15684 - protein, 15 aa, synthetic construct
IPGEQTQHGDAAQPE

SEQ ID NO: 15685 - protein, 15 aa, synthetic construct
IPGKNKPHTSAGGSI

SEQ ID NO: 15686 - protein, 15 aa, synthetic construct
IPLHPPEALAAPAPH

SEQ ID NO: 15687 - protein, 15 aa, synthetic construct
IPPHGDSAGAGREAA

SEQ ID NO: 15688 - protein, 15 aa, synthetic construct
IPQIHLDPPGHTPRQ

SEQ ID NO: 15689 - protein, 15 aa, synthetic construct
IPRDPDGRAPAAARR

SEQ ID NO: 15690 - protein, 15 aa, synthetic construct
IPTGDSHPWDKQPGN

SEQ ID NO: 15691 - protein, 15 aa, synthetic construct
IPTRPKCPRSGRSPT

SEQ ID NO: 15692 - protein, 15 aa, synthetic construct
IQGPFGGGGAAATPR

SEQ ID NO: 15693 - protein, 15 aa, synthetic construct
IQLPGLGGSERVGLP

SEQ ID NO: 15694 - protein, 15 aa, synthetic construct
IRGAGSKPPEAPGLF

SEQ ID NO: 15695 - protein, 15 aa, synthetic construct
IRGRRVPEARGAAAA

SEQ ID NO: 15696 - protein, 15 aa, synthetic construct
IRRPRAGAGGDWRSW

SEQ ID NO: 15697 - protein, 15 aa, synthetic construct
IRRSGLWQQETGSAR

SEQ ID NO: 15698 - protein, 15 aa, synthetic construct
IRSRPGRLRGAARAR

SEQ ID NO: 15699 - protein, 15 aa, synthetic construct
IRTLHFAACALRPQN

SEQ ID NO: 15700 - protein, 15 aa, synthetic construct
IRTSWSRWCCAAPAK

SEQ ID NO: 15701 - protein, 15 aa, synthetic construct
ISAFKAAQETWAPET

SEQ ID NO: 15702 - protein, 15 aa, synthetic construct
ISKRGEWWPGPPLGE

SEQ ID NO: 15703 - protein, 15 aa, synthetic construct
ISLVPAELSGLVELD

SEQ ID NO: 15704 - protein, 15 aa, synthetic construct
ISPAVAPQAVGHPAA

SEQ ID NO: 15705 - protein, 15 aa, synthetic construct
ISRRRRRRWEAPWAP

SEQ ID NO: 15706 - protein, 15 aa, synthetic construct
ISRVTPITIGGLTMA

SEQ ID NO: 15707 - protein, 15 aa, synthetic construct
ISTPTPSSTCATGSS

SEQ ID NO: 15708 - protein, 15 aa, synthetic construct
ISTRSCHWPAPWRCR

SEQ ID NO: 15709 - protein, 15 aa, synthetic construct
ISTRSSSSATGWWPL

SEQ ID NO: 15710 - protein, 15 aa, synthetic construct
ITGNTVRATEKQGFY

SEQ ID NO: 15711 - protein, 15 aa, synthetic construct
ITRNRAMAHKAETAQ

SEQ ID NO: 15712 - protein, 15 aa, synthetic construct
ITTPRTASRRAATWR

SEQ ID NO: 15713 - protein, 15 aa, synthetic construct
KAGALLPEGGVLGGA

SEQ ID NO: 15714 - protein, 15 aa, synthetic construct
KAGTGTARSPAAPSC

SEQ ID NO: 15715 - protein, 15 aa, synthetic construct
KAKGRSATRTRNSVK

SEQ ID NO: 15716 - protein, 15 aa, synthetic construct
KAPGLRPRARRKRQQ

SEQ ID NO: 15717 - protein, 15 aa, synthetic construct
KAQPILPPTIGSGTS

SEQ ID NO: 15718 - protein, 15 aa, synthetic construct
KATRTRRRRWPPRAA

SEQ ID NO: 15719 - protein, 15 aa, synthetic construct
KCAENAASATAAAMP

SEQ ID NO: 15720 - protein, 15 aa, synthetic construct
KCASRRWARVAERTR

SEQ ID NO: 15721 - protein, 15 aa, synthetic construct
KDAVRHGAAAQVPDL

SEQ ID NO: 15722 - protein, 15 aa, synthetic construct
KDPPVCRRPPFSWSP

SEQ ID NO: 15723 - protein, 15 aa, synthetic construct
KDQSVSQKFAPPSIR

SEQ ID NO: 15724 - protein, 15 aa, synthetic construct
KDSQSGTQCTFHATK

SEQ ID NO: 15725 - protein, 15 aa, synthetic construct
KECDDWRADGCLPSI

SEQ ID NO: 15726 - protein, 15 aa, synthetic construct
KEGRELKRKMARSGR

SEQ ID NO: 15727 - protein, 15 aa, synthetic construct
KENWHLFQGGPSGIQ

SEQ ID NO: 15728 - protein, 15 aa, synthetic construct
KEPCSSRSTSSPCWG

SEQ ID NO: 15729 - protein, 15 aa, synthetic construct
KGCYESAEEGRQEAQ

SEQ ID NO: 15730 - protein, 15 aa, synthetic construct
KGGHPGASPLRGVWN

SEQ ID NO: 15731 - protein, 15 aa, synthetic construct
KGGSGDPDQPPDPAG

SEQ ID NO: 15732 - protein, 15 aa, synthetic construct
KGKEGGDGGVFGRCY

SEQ ID NO: 15733 - protein, 15 aa, synthetic construct
KGSEGARGHGPIREQ

SEQ ID NO: 15734 - protein, 15 aa, synthetic construct
KGSRLRSPRRGRARR

SEQ ID NO: 15735 - protein, 15 aa, synthetic construct
KGTGTPAGSMKTTGV

SEQ ID NO: 15736 - protein, 15 aa, synthetic construct
KGYCAQQQLGRNAGP

SEQ ID NO: 15737 - protein, 15 aa, synthetic construct
KHGEGRSPGNGPAAH

SEQ ID NO: 15738 - protein, 15 aa, synthetic construct
KIPSPGTDRGSGTAA

SEQ ID NO: 15739 - protein, 15 aa, synthetic construct
KIWAKCWQERCLLLQ

SEQ ID NO: 15740 - protein, 15 aa, synthetic construct
KKALRPPEKYGGFVS

SEQ ID NO: 15741 - protein, 15 aa, synthetic construct
KKEAGATRDGAELPL

SEQ ID NO: 15742 - protein, 15 aa, synthetic construct
KKRQRIPNQTKKMTT

SEQ ID NO: 15743 - protein, 15 aa, synthetic construct
KKTCSRKAKKENSYI

SEQ ID NO: 15744 - protein, 15 aa, synthetic construct
KLCRRKGSPAASPES

SEQ ID NO: 15745 - protein, 15 aa, synthetic construct
KLPGHGGGAPPGCNQ

SEQ ID NO: 15746 - protein, 15 aa, synthetic construct
KLYKGYADGGHGGSG

SEQ ID NO: 15747 - protein, 15 aa, synthetic construct
KNERRPALAVAPAPA

SEQ ID NO: 15748 - protein, 15 aa, synthetic construct
KNRPKQTLAVRATGA

SEQ ID NO: 15749 - protein, 15 aa, synthetic construct
KNTCEEKGEEGRRNC

SEQ ID NO: 15750 - protein, 15 aa, synthetic construct
KPAARASRLKAARKP

SEQ ID NO: 15751 - protein, 15 aa, synthetic construct
KPAHPADSLPSPNSK

SEQ ID NO: 15752 - protein, 15 aa, synthetic construct
KPAPARDTLKVKGWD

SEQ ID NO: 15753 - protein, 15 aa, synthetic construct
KPEGGAVPALRLPGA

SEQ ID NO: 15754 - protein, 15 aa, synthetic construct
KPPFTRSTERCGPLA

SEQ ID NO: 15755 - protein, 15 aa, synthetic construct
KPPRPCGLQRRLWTA

SEQ ID NO: 15756 - protein, 15 aa, synthetic construct
KPQGAGPGRRPPGSW

SEQ ID NO: 15757 - protein, 15 aa, synthetic construct
KPQGPWEIFGVPTTI

SEQ ID NO: 15758 - protein, 15 aa, synthetic construct
KPRSRPRRRSSGAPG

SEQ ID NO: 15759 - protein, 15 aa, synthetic construct
KPTQTSVCVDHPHLQ

SEQ ID NO: 15760 - protein, 15 aa, synthetic construct
KPVDVARKDHSISRG

SEQ ID NO: 15761 - protein, 15 aa, synthetic construct
KPVRPGGAAVGPGQG

SEQ ID NO: 15762 - protein, 15 aa, synthetic construct
KRKGKRTCETEASPS

SEQ ID NO: 15763 - protein, 15 aa, synthetic construct
KRLLRKCRRRTARSA

SEQ ID NO: 15764 - protein, 15 aa, synthetic construct
KRQSIAGCSSSTSTR

SEQ ID NO: 15765 - protein, 15 aa, synthetic construct
KRRRGRGRARLQLQA

SEQ ID NO: 15766 - protein, 15 aa, synthetic construct
KRSFPPRRWPGRSSR

SEQ ID NO: 15767 - protein, 15 aa, synthetic construct
KRSRPAVNRNPRMSR

SEQ ID NO: 15768 - protein, 15 aa, synthetic construct
KRTGSQASKKALPPR

SEQ ID NO: 15769 - protein, 15 aa, synthetic construct
KRTGTGTCSWTRPGR

SEQ ID NO: 15770 - protein, 15 aa, synthetic construct
KRTSKRGSQTVLRTC

SEQ ID NO: 15771 - protein, 15 aa, synthetic construct
KRVLPGPVFSFQLAV

SEQ ID NO: 15772 - protein, 15 aa, synthetic construct
KSADPRDRSEGRGEA

SEQ ID NO: 15773 - protein, 15 aa, synthetic construct
KSGPRSILPFGGYPW

SEQ ID NO: 15774 - protein, 15 aa, synthetic construct
KSGRIAAVNEGEAAS

SEQ ID NO: 15775 - protein, 15 aa, synthetic construct
KSKMRMKTMMTVTRK

SEQ ID NO: 15776 - protein, 15 aa, synthetic construct
KSPTVAGPTITKSTT

SEQ ID NO: 15777 - protein, 15 aa, synthetic construct
KSRKRPGVGVDRDVH

SEQ ID NO: 15778 - protein, 15 aa, synthetic construct
KSRRRSSSPRMRRRS

SEQ ID NO: 15779 - protein, 15 aa, synthetic construct
KTPSLSAPTWTRSTA

SEQ ID NO: 15780 - protein, 15 aa, synthetic construct
KTRRGPRPWTRSPPW

SEQ ID NO: 15781 - protein, 15 aa, synthetic construct
KTRRTPTSTRPVSSA

SEQ ID NO: 15782 - protein, 15 aa, synthetic construct
KTTAGAARAAAAALA

SEQ ID NO: 15783 - protein, 15 aa, synthetic construct
KTTGRGARAAAPREL

SEQ ID NO: 15784 - protein, 15 aa, synthetic construct
KVAVVPVGAPRGAVV

SEQ ID NO: 15785 - protein, 15 aa, synthetic construct
KVVPQPRPARPRPRP

SEQ ID NO: 15786 - protein, 15 aa, synthetic construct
KWQVLKAPKFSNVSN

SEQ ID NO: 15787 - protein, 15 aa, synthetic construct
LAAAAAEAAAVAGRA

SEQ ID NO: 15788 - protein, 15 aa, synthetic construct
LAADAAERVFAQLEP

SEQ ID NO: 15789 - protein, 15 aa, synthetic construct
LAAGAAPRAGRGRRA

SEQ ID NO: 15790 - protein, 15 aa, synthetic construct
LAAGPQGPAPAHPQP

SEQ ID NO: 15791 - protein, 15 aa, synthetic construct
LAAGRAVPGEQPLAG

SEQ ID NO: 15792 - protein, 15 aa, synthetic construct
LAAGRPLGLDPVRPV

SEQ ID NO: 15793 - protein, 15 aa, synthetic construct
LAAPLCTHRGGAGCE

SEQ ID NO: 15794 - protein, 15 aa, synthetic construct
LAAQERRVPRAAEVP

SEQ ID NO: 15795 - protein, 15 aa, synthetic construct
LAARGGWGGQSGDHV

SEQ ID NO: 15796 - protein, 15 aa, synthetic construct
LAARSEAVPALDRVR

SEQ ID NO: 15797 - protein, 15 aa, synthetic construct
LADPAPVAVAAARCT

SEQ ID NO: 15798 - protein, 15 aa, synthetic construct
LAESGQPRRGRGTRG

SEQ ID NO: 15799 - protein, 15 aa, synthetic construct
LAGAPREAVSPVGCP

SEQ ID NO: 15800 - protein, 15 aa, synthetic construct
LAGDYRDPEEAASPV

SEQ ID NO: 15801 - protein, 15 aa, synthetic construct
LAGGEEDLSPPSLPR

SEQ ID NO: 15802 - protein, 15 aa, synthetic construct
LAGPAGRGAEPGPAA

SEQ ID NO: 15803 - protein, 15 aa, synthetic construct
LAGPLPPAPRRGVLQ

SEQ ID NO: 15804 - protein, 15 aa, synthetic construct
LAGRPQAAGHAPQEG

SEQ ID NO: 15805 - protein, 15 aa, synthetic construct
LAGTDAVGGAAHGAG

SEQ ID NO: 15806 - protein, 15 aa, synthetic construct
LAIPDFPTASRWQPR

SEQ ID NO: 15807 - protein, 15 aa, synthetic construct
LANVTSSSTPGPRLR

SEQ ID NO: 15808 - protein, 15 aa, synthetic construct
LAPGGPGAAGVPGAP

SEQ ID NO: 15809 - protein, 15 aa, synthetic construct
LAPGSGAACARAPRR

SEQ ID NO: 15810 - protein, 15 aa, synthetic construct
LAPPRPCPRPTCEPP

SEQ ID NO: 15811 - protein, 15 aa, synthetic construct
LAPVPGPSGQLHRAG

SEQ ID NO: 15812 - protein, 15 aa, synthetic construct
LAQEKVPWCQVPQEP

SEQ ID NO: 15813 - protein, 15 aa, synthetic construct
LAQERSQMQQGQKRG

SEQ ID NO: 15814 - protein, 15 aa, synthetic construct
LAQPHCPTAAAGRPR

SEQ ID NO: 15815 - protein, 15 aa, synthetic construct
LARRARRGSRRRRPQ

SEQ ID NO: 15816 - protein, 15 aa, synthetic construct
LARTSTAAATARTSR

SEQ ID NO: 15817 - protein, 15 aa, synthetic construct
LASAPAWPRWRGTPR

SEQ ID NO: 15818 - protein, 15 aa, synthetic construct
LASAPCSLGGGERPA

SEQ ID NO: 15819 - protein, 15 aa, synthetic construct
LASAPRSLGGGERPA

SEQ ID NO: 15820 - protein, 15 aa, synthetic construct
LASDPRNVGGGERPA

SEQ ID NO: 15821 - protein, 15 aa, synthetic construct
LASSRRPPGTWNPPR

SEQ ID NO: 15822 - protein, 15 aa, synthetic construct
LATRISFLMGAIATE

SEQ ID NO: 15823 - protein, 15 aa, synthetic construct
LAVRAPGGAAAGPGA

SEQ ID NO: 15824 - protein, 15 aa, synthetic construct
LAWVPCPCPRVLPKL

SEQ ID NO: 15825 - protein, 15 aa, synthetic construct
LCQLAGSPSTPEALA

SEQ ID NO: 15826 - protein, 15 aa, synthetic construct
LCRRRGCCRGRSRRL

SEQ ID NO: 15827 - protein, 15 aa, synthetic construct
LDHGAAVLLGNQEEV

SEQ ID NO: 15828 - protein, 15 aa, synthetic construct
LDLPCEILQGGAGER

SEQ ID NO: 15829 - protein, 15 aa, synthetic construct
LDPLPCDQQPGADQT

SEQ ID NO: 15830 - protein, 15 aa, synthetic construct
LDRGCGGDGRPRGGR

SEQ ID NO: 15831 - protein, 15 aa, synthetic construct
LDRQVLLDPHNDAKN

SEQ ID NO: 15832 - protein, 15 aa, synthetic construct
LDSGSRVSSGRYRRD

SEQ ID NO: 15833 - protein, 15 aa, synthetic construct
LDSIPTSGPTRNNSS

SEQ ID NO: 15834 - protein, 15 aa, synthetic construct
LDSPVGSMQALRPSA

SEQ ID NO: 15835 - protein, 15 aa, synthetic construct
LDSTQQRQQQAATEK

SEQ ID NO: 15836 - protein, 15 aa, synthetic construct
LDTCACQGCSDNAGH

SEQ ID NO: 15837 - protein, 15 aa, synthetic construct
LEAVPLREVLPDLRA

SEQ ID NO: 15838 - protein, 15 aa, synthetic construct
LECGPPQGPPEPRLP

SEQ ID NO: 15839 - protein, 15 aa, synthetic construct
LEELRAPQPLAQRVL

SEQ ID NO: 15840 - protein, 15 aa, synthetic construct
LEGGDGAHAGRASVL

SEQ ID NO: 15841 - protein, 15 aa, synthetic construct
LEGGDQDAAGARRRS

SEQ ID NO: 15842 - protein, 15 aa, synthetic construct
LEGGSPPGVARGGGP

SEQ ID NO: 15843 - protein, 15 aa, synthetic construct
LELGGRVRGGAGAAD

SEQ ID NO: 15844 - protein, 15 aa, synthetic construct
LELREEGVSGQDRWQ

SEQ ID NO: 15845 - protein, 15 aa, synthetic construct
LEPEAWREGAEAGAG

SEQ ID NO: 15846 - protein, 15 aa, synthetic construct
LEPGPSAAHLLCRPQ

SEQ ID NO: 15847 - protein, 15 aa, synthetic construct
LEQLHTAPAGHHQGH

SEQ ID NO: 15848 - protein, 15 aa, synthetic construct
LERERDRAWASERGR

SEQ ID NO: 15849 - protein, 15 aa, synthetic construct
LERVPPEPARDGLRG

SEQ ID NO: 15850 - protein, 15 aa, synthetic construct
LFAASENRGSERPPA

SEQ ID NO: 15851 - protein, 15 aa, synthetic construct
LFSPGAFGSFSRRIP

SEQ ID NO: 15852 - protein, 15 aa, synthetic construct
LFTHGPSSMPLHPRP

SEQ ID NO: 15853 - protein, 15 aa, synthetic construct
LGAAVPGAAGAHPLR

SEQ ID NO: 15854 - protein, 15 aa, synthetic construct
LGADQRGARPGARAP

SEQ ID NO: 15855 - protein, 15 aa, synthetic construct
LGAGDHPRPLCHPQK

SEQ ID NO: 15856 - protein, 15 aa, synthetic construct
LGAHLEAPGGRVRQE

SEQ ID NO: 15857 - protein, 15 aa, synthetic construct
LGARDAGGPVRDLDP

SEQ ID NO: 15858 - protein, 15 aa, synthetic construct
LGARVGRLPRLPRVP

SEQ ID NO: 15859 - protein, 15 aa, synthetic construct
LGCTDPGGEAAGGVG

SEQ ID NO: 15860 - protein, 15 aa, synthetic construct
LGDPHFHPPPRPTHP

SEQ ID NO: 15861 - protein, 15 aa, synthetic construct
LGDPRAAPPGSSGSF

SEQ ID NO: 15862 - protein, 15 aa, synthetic construct
LGDRRAETGAEDRNR

SEQ ID NO: 15863 - protein, 15 aa, synthetic construct
LGDSRGRPEPGAGDR

SEQ ID NO: 15864 - protein, 15 aa, synthetic construct
LGEDDPEPAASRPGE

SEQ ID NO: 15865 - protein, 15 aa, synthetic construct
LGEERRSGGGGGRGA

SEQ ID NO: 15866 - protein, 15 aa, synthetic construct
LGEPQEAHRGGGQEA

SEQ ID NO: 15867 - protein, 15 aa, synthetic construct
LGGAQHLQGQRQRRV

SEQ ID NO: 15868 - protein, 15 aa, synthetic construct
LGGEEVGGTPQAEAI

SEQ ID NO: 15869 - protein, 15 aa, synthetic construct
LGGPGPGWDRGGRRW

SEQ ID NO: 15870 - protein, 15 aa, synthetic construct
LGGPMDELRGAEHRP

SEQ ID NO: 15871 - protein, 15 aa, synthetic construct
LGGPQCPDGAEPPPA

SEQ ID NO: 15872 - protein, 15 aa, synthetic construct
LGGQPDLAAPGFLLR

SEQ ID NO: 15873 - protein, 15 aa, synthetic construct
LGKGPTQKSKKHFPK

SEQ ID NO: 15874 - protein, 15 aa, synthetic construct
LGKWRRRRRRDEAGA

SEQ ID NO: 15875 - protein, 15 aa, synthetic construct
LGLDASPGADLRFSC

SEQ ID NO: 15876 - protein, 15 aa, synthetic construct
LGLPAAAAAGLPRPG

SEQ ID NO: 15877 - protein, 15 aa, synthetic construct
LGLRGHGEHGGEVPE

SEQ ID NO: 15878 - protein, 15 aa, synthetic construct
LGLRGQLSRRARRAA

SEQ ID NO: 15879 - protein, 15 aa, synthetic construct
LGPPAPTPAAAAAVA

SEQ ID NO: 15880 - protein, 15 aa, synthetic construct
LGPRHDRAQLFPNRA

SEQ ID NO: 15881 - protein, 15 aa, synthetic construct
LGRGSGGGGAPAGRG

SEQ ID NO: 15882 - protein, 15 aa, synthetic construct
LGRLGLGGRGAVGRA

SEQ ID NO: 15883 - protein, 15 aa, synthetic construct
LGRPGAAAAPELSET

SEQ ID NO: 15884 - protein, 15 aa, synthetic construct
LGRRRVPGPAAEPER

SEQ ID NO: 15885 - protein, 15 aa, synthetic construct
LGRTRGCGTEEVQVI

SEQ ID NO: 15886 - protein, 15 aa, synthetic construct
LGSACSPLPSGAAAS

SEQ ID NO: 15887 - protein, 15 aa, synthetic construct
LGSLRGVGAAAPARL

SEQ ID NO: 15888 - protein, 15 aa, synthetic construct
LGSLWLPEKPLSAAW

SEQ ID NO: 15889 - protein, 15 aa, synthetic construct
LGSRLCLPGQKLPEK

SEQ ID NO: 15890 - protein, 15 aa, synthetic construct
LHAAGAERPGARAHR

SEQ ID NO: 15891 - protein, 15 aa, synthetic construct
LHGARVQLPVAASAR

SEQ ID NO: 15892 - protein, 15 aa, synthetic construct
LHGCPPAAAPAAVAT

SEQ ID NO: 15893 - protein, 15 aa, synthetic construct
LHGILCELPGDTGSA

SEQ ID NO: 15894 - protein, 15 aa, synthetic construct
LHGPHEDEGDRGSLP

SEQ ID NO: 15895 - protein, 15 aa, synthetic construct
LHHPELQLGASGAAA

SEQ ID NO: 15896 - protein, 15 aa, synthetic construct
LHLPLRPGLGGGPVP

SEQ ID NO: 15897 - protein, 15 aa, synthetic construct
LHNMACSKPSSSHVL

SEQ ID NO: 15898 - protein, 15 aa, synthetic construct
LHPPGDPLGSLGRTY

SEQ ID NO: 15899 - protein, 15 aa, synthetic construct
LHPPVLRRRQLHPAL

SEQ ID NO: 15900 - protein, 15 aa, synthetic construct
LHRGQEGEDGGQDQQ

SEQ ID NO: 15901 - protein, 15 aa, synthetic construct
LHRQDLLLQESAPGQ

SEQ ID NO: 15902 - protein, 15 aa, synthetic construct
LHRRRSRERQRQRRL

SEQ ID NO: 15903 - protein, 15 aa, synthetic construct
LIIQMKSKKSQAMPQ

SEQ ID NO: 15904 - protein, 15 aa, synthetic construct
LITERPFPLIPLWGP

SEQ ID NO: 15905 - protein, 15 aa, synthetic construct
LKAAGVRGRPCTLSQ

SEQ ID NO: 15906 - protein, 15 aa, synthetic construct
LKHIPQPGADSDRRS

SEQ ID NO: 15907 - protein, 15 aa, synthetic construct
LKHQRPTWAMPGSWD

SEQ ID NO: 15908 - protein, 15 aa, synthetic construct
LKIGSATRVHIPQRV

SEQ ID NO: 15909 - protein, 15 aa, synthetic construct
LKMAGPGRGPGRPPG

SEQ ID NO: 15910 - protein, 15 aa, synthetic construct
LKREAARPSLRHLPE

SEQ ID NO: 15911 - protein, 15 aa, synthetic construct
LKTSRRSSSSKRPSE

SEQ ID NO: 15912 - protein, 15 aa, synthetic construct
LLAPAALPDPQAHRA

SEQ ID NO: 15913 - protein, 15 aa, synthetic construct
LLAPLRFQPARRVPG

SEQ ID NO: 15914 - protein, 15 aa, synthetic construct
LLCQMGSSILEGTYA

SEQ ID NO: 15915 - protein, 15 aa, synthetic construct
LLCTSTGSPLDVPSP

SEQ ID NO: 15916 - protein, 15 aa, synthetic construct
LLGARAGAGARRGPG

SEQ ID NO: 15917 - protein, 15 aa, synthetic construct
LLLAPPEASGAGSSR

SEQ ID NO: 15918 - protein, 15 aa, synthetic construct
LLLEPGQPPAELVSP

SEQ ID NO: 15919 - protein, 15 aa, synthetic construct
LLPASRAVAAPHAMG

SEQ ID NO: 15920 - protein, 15 aa, synthetic construct
LLPESPQMPQVSPLP

SEQ ID NO: 15921 - protein, 15 aa, synthetic construct
LLPGQLSERDAHCQG

SEQ ID NO: 15922 - protein, 15 aa, synthetic construct
LLPKPQSKHGRADQL

SEQ ID NO: 15923 - protein, 15 aa, synthetic construct
LLPPAHAGQVPQPGL

SEQ ID NO: 15924 - protein, 15 aa, synthetic construct
LLPPAMPARRCASCL

SEQ ID NO: 15925 - protein, 15 aa, synthetic construct
LLQGPAAGWRGFCQL

SEQ ID NO: 15926 - protein, 15 aa, synthetic construct
LLRAGAVAAGAEPEL

SEQ ID NO: 15927 - protein, 15 aa, synthetic construct
LLRCEAERQGPLPQD

SEQ ID NO: 15928 - protein, 15 aa, synthetic construct
LLRGRLLHAPAGPAQ

SEQ ID NO: 15929 - protein, 15 aa, synthetic construct
LLRRSAGCGRPLGGL

SEQ ID NO: 15930 - protein, 15 aa, synthetic construct
LNFLPYHPPWKFPHH

SEQ ID NO: 15931 - protein, 15 aa, synthetic construct
LNSPAWEASGLHWSS

SEQ ID NO: 15932 - protein, 15 aa, synthetic construct
LPAAIPSRPGAGQPP

SEQ ID NO: 15933 - protein, 15 aa, synthetic construct
LPAALRLPEPVRVAQ

SEQ ID NO: 15934 - protein, 15 aa, synthetic construct
LPAAPATSAAPLVDP

SEQ ID NO: 15935 - protein, 15 aa, synthetic construct
LPAAQRIPALRRSLR

SEQ ID NO: 15936 - protein, 15 aa, synthetic construct
LPAAREAGGGSVQGP

SEQ ID NO: 15937 - protein, 15 aa, synthetic construct
LPAATPGGRLPRRGR

SEQ ID NO: 15938 - protein, 15 aa, synthetic construct
LPAGADPARPPAALL

SEQ ID NO: 15939 - protein, 15 aa, synthetic construct
LPAGRLLPAVASAAG

SEQ ID NO: 15940 - protein, 15 aa, synthetic construct
LPALLPEPPVPGPRL

SEQ ID NO: 15941 - protein, 15 aa, synthetic construct
LPANRTCCRGQMALL

SEQ ID NO: 15942 - protein, 15 aa, synthetic construct
LPAPHLLPAQRQHHP

SEQ ID NO: 15943 - protein, 15 aa, synthetic construct
LPAQGAAAGGGVPLP

SEQ ID NO: 15944 - protein, 15 aa, synthetic construct
LPARERPEHHAQPLG

SEQ ID NO: 15945 - protein, 15 aa, synthetic construct
LPAWPRVWSPTPRGP

SEQ ID NO: 15946 - protein, 15 aa, synthetic construct
LPCPHVHHRPVRGGH

SEQ ID NO: 15947 - protein, 15 aa, synthetic construct
LPDAADERQEAHEQP

SEQ ID NO: 15948 - protein, 15 aa, synthetic construct
LPEARVFAAVPDGRH

SEQ ID NO: 15949 - protein, 15 aa, synthetic construct
LPEKTFGCAAPRSGL

SEQ ID NO: 15950 - protein, 15 aa, synthetic construct
LPEPARSGRSRGGGA

SEQ ID NO: 15951 - protein, 15 aa, synthetic construct
LPEPSGRPSGHPGAR

SEQ ID NO: 15952 - protein, 15 aa, synthetic construct
LPEQHLQPGPASIHQ

SEQ ID NO: 15953 - protein, 15 aa, synthetic construct
LPERALRRALPAPAA

SEQ ID NO: 15954 - protein, 15 aa, synthetic construct
LPEREEEDGQREWAS

SEQ ID NO: 15955 - protein, 15 aa, synthetic construct
LPESAPSRPRAPAAR

SEQ ID NO: 15956 - protein, 15 aa, synthetic construct
LPGDPQGPGTAAPRA

SEQ ID NO: 15957 - protein, 15 aa, synthetic construct
LPGERAGIARAGAVR

SEQ ID NO: 15958 - protein, 15 aa, synthetic construct
LPGGCPGQPAEPELA

SEQ ID NO: 15959 - protein, 15 aa, synthetic construct
LPGGVGLPAARAEGP

SEQ ID NO: 15960 - protein, 15 aa, synthetic construct
LPGHLPPLQGQDPHV

SEQ ID NO: 15961 - protein, 15 aa, synthetic construct
LPGPPPRMEEGGSDP

SEQ ID NO: 15962 - protein, 15 aa, synthetic construct
LPGQGCSGTGPDPCP

SEQ ID NO: 15963 - protein, 15 aa, synthetic construct
LPGRRRGSRARSGRV

SEQ ID NO: 15964 - protein, 15 aa, synthetic construct
LPHHVPARCGGECAH

SEQ ID NO: 15965 - protein, 15 aa, synthetic construct
LPLAGAPDAGGCQGA

SEQ ID NO: 15966 - protein, 15 aa, synthetic construct
LPLCPEPGGAAAGRQ

SEQ ID NO: 15967 - protein, 15 aa, synthetic construct
LPLSPRRPPAASGAP

SEQ ID NO: 15968 - protein, 15 aa, synthetic construct
LPLSQESRKRHQPRT

SEQ ID NO: 15969 - protein, 15 aa, synthetic construct
LPPAPLRPGLRQQLL

SEQ ID NO: 15970 - protein, 15 aa, synthetic construct
LPPARAAGLLGGLLR

SEQ ID NO: 15971 - protein, 15 aa, synthetic construct
LPPGRDRQRPGAGDP

SEQ ID NO: 15972 - protein, 15 aa, synthetic construct
LPPGRRAAAAPAEEH

SEQ ID NO: 15973 - protein, 15 aa, synthetic construct
LPPGSGPCGSHPKTA

SEQ ID NO: 15974 - protein, 15 aa, synthetic construct
LPPPAGAALPWDQHP

SEQ ID NO: 15975 - protein, 15 aa, synthetic construct
LPPPGPASLPLGQAP

SEQ ID NO: 15976 - protein, 15 aa, synthetic construct
LPPRCPPPTGPDRRA

SEQ ID NO: 15977 - protein, 15 aa, synthetic construct
LPPRVQPSAPAKKSS

SEQ ID NO: 15978 - protein, 15 aa, synthetic construct
LPPSPAASLAGPPAP

SEQ ID NO: 15979 - protein, 15 aa, synthetic construct
LPPSPGSPPAVSESS

SEQ ID NO: 15980 - protein, 15 aa, synthetic construct
LPQLEPDPGHSVLGG

SEQ ID NO: 15981 - protein, 15 aa, synthetic construct
LPVLAGPGAPWHPPV

SEQ ID NO: 15982 - protein, 15 aa, synthetic construct
LPVLCPQHLLPTRGL

SEQ ID NO: 15983 - protein, 15 aa, synthetic construct
LPVLGLGQAELRGRR

SEQ ID NO: 15984 - protein, 15 aa, synthetic construct
LPVPCVGTGQDSSGN

SEQ ID NO: 15985 - protein, 15 aa, synthetic construct
LPVPPPRPPNLRPQL

SEQ ID NO: 15986 - protein, 15 aa, synthetic construct
LPVRRRARRRRHPQA

SEQ ID NO: 15987 - protein, 15 aa, synthetic construct
LQAGPASLPPVPAQP

SEQ ID NO: 15988 - protein, 15 aa, synthetic construct
LQARRAARARGRGAR

SEQ ID NO: 15989 - protein, 15 aa, synthetic construct
LQEAGGVPVLPERAG

SEQ ID NO: 15990 - protein, 15 aa, synthetic construct
LQEAGRMPVFPQRER

SEQ ID NO: 15991 - protein, 15 aa, synthetic construct
LQGHPDLSDLRAAAR

SEQ ID NO: 15992 - protein, 15 aa, synthetic construct
LQGLPTEPKRHATGS

SEQ ID NO: 15993 - protein, 15 aa, synthetic construct
LQGPAGGAAQTPGGT

SEQ ID NO: 15994 - protein, 15 aa, synthetic construct
LQGPGQAAAEGDAVH

SEQ ID NO: 15995 - protein, 15 aa, synthetic construct
LQHDSYAQPDGPREP

SEQ ID NO: 15996 - protein, 15 aa, synthetic construct
LQHPRAQPKILPGTQ

SEQ ID NO: 15997 - protein, 15 aa, synthetic construct
LQLWGMWLQMLCACL

SEQ ID NO: 15998 - protein, 15 aa, synthetic construct
LQPALHGEELPAQRA

SEQ ID NO: 15999 - protein, 15 aa, synthetic construct
LQPDHPAQPAGPHEP

SEQ ID NO: 16000 - protein, 15 aa, synthetic construct
LQPGPQPGSQPRAAA

SEQ ID NO: 16001 - protein, 15 aa, synthetic construct
LQPGYMPPALERGHF

SEQ ID NO: 16002 - protein, 15 aa, synthetic construct
LQPPSRVAARREGAI

SEQ ID NO: 16003 - protein, 15 aa, synthetic construct
LQQEGPEEHLAEETQ

SEQ ID NO: 16004 - protein, 15 aa, synthetic construct
LQQEQVSELLQAPRV

SEQ ID NO: 16005 - protein, 15 aa, synthetic construct
LQQSRAAAAATSAGT

SEQ ID NO: 16006 - protein, 15 aa, synthetic construct
LQRDPQPSRGTGHHV

SEQ ID NO: 16007 - protein, 15 aa, synthetic construct
LQREERQGAGAGGRA

SEQ ID NO: 16008 - protein, 15 aa, synthetic construct
LQRPRAPALPSAAAL

SEQ ID NO: 16009 - protein, 15 aa, synthetic construct
LQRQERPGAAARLAD

SEQ ID NO: 16010 - protein, 15 aa, synthetic construct
LQRRARGEPGRVGDR

SEQ ID NO: 16011 - protein, 15 aa, synthetic construct
LQRRPPAARTRSRAA

SEQ ID NO: 16012 - protein, 15 aa, synthetic construct
LQTAEGAEGVCAGQN

SEQ ID NO: 16013 - protein, 15 aa, synthetic construct
LQTPRGWAVPESPGE

SEQ ID NO: 16014 - protein, 15 aa, synthetic construct
LRAAAAAARARERGG

SEQ ID NO: 16015 - protein, 15 aa, synthetic construct
LRAAAGSQSPGGARR

SEQ ID NO: 16016 - protein, 15 aa, synthetic construct
LRAAGPGDRDAAHPA

SEQ ID NO: 16017 - protein, 15 aa, synthetic construct
LRAAHPEVPQPVRRP

SEQ ID NO: 16018 - protein, 15 aa, synthetic construct
LRAAQPGQASAVDAH

SEQ ID NO: 16019 - protein, 15 aa, synthetic construct
LRAPRCPPGCASTST

SEQ ID NO: 16020 - protein, 15 aa, synthetic construct
LRARDPRASPGRPPR

SEQ ID NO: 16021 - protein, 15 aa, synthetic construct
LRARPAPTEAARRRL

SEQ ID NO: 16022 - protein, 15 aa, synthetic construct
LRASSWPPRRLGRAL

SEQ ID NO: 16023 - protein, 15 aa, synthetic construct
LRATAGLPHPGRVPA

SEQ ID NO: 16024 - protein, 15 aa, synthetic construct
LRDLLQPEPAVPAAA

SEQ ID NO: 16025 - protein, 15 aa, synthetic construct
LRDPREWERQSGTPQ

SEQ ID NO: 16026 - protein, 15 aa, synthetic construct
LRDVCCGPWGKYSDP

SEQ ID NO: 16027 - protein, 15 aa, synthetic construct
LREIQLRQPQVAPPA

SEQ ID NO: 16028 - protein, 15 aa, synthetic construct
LREPAAVLGRRRRRR

SEQ ID NO: 16029 - protein, 15 aa, synthetic construct
LREQPAQDLFPGSRP

SEQ ID NO: 16030 - protein, 15 aa, synthetic construct
LRERPRPQLCPPIAP

SEQ ID NO: 16031 - protein, 15 aa, synthetic construct
LRGASPRREGQELGG

SEQ ID NO: 16032 - protein, 15 aa, synthetic construct
LRGDDGGGPGSWPPS

SEQ ID NO: 16033 - protein, 15 aa, synthetic construct
LRGEPSDRRAREGLG

SEQ ID NO: 16034 - protein, 15 aa, synthetic construct
LRGGQDLPAVPLHRQ

SEQ ID NO: 16035 - protein, 15 aa, synthetic construct
LRGLHPGLVGPLRKG

SEQ ID NO: 16036 - protein, 15 aa, synthetic construct
LRGNSGNRGKAEKCP

SEQ ID NO: 16037 - protein, 15 aa, synthetic construct
LRGPASRKSPSKGTS

SEQ ID NO: 16038 - protein, 15 aa, synthetic construct
LRGRARGPQGDVGPQ

SEQ ID NO: 16039 - protein, 15 aa, synthetic construct
LRGRPQSRRGAPGAR

SEQ ID NO: 16040 - protein, 15 aa, synthetic construct
LRGRVLVASAEAQSR

SEQ ID NO: 16041 - protein, 15 aa, synthetic construct
LRKRSEAASPDSRNV

SEQ ID NO: 16042 - protein, 15 aa, synthetic construct
LRLPPSGAAQTAGPA

SEQ ID NO: 16043 - protein, 15 aa, synthetic construct
LRLPRGAGEGAGPRA

SEQ ID NO: 16044 - protein, 15 aa, synthetic construct
LRPAAFCPGPDPQLH

SEQ ID NO: 16045 - protein, 15 aa, synthetic construct
LRPAPPPVQPAAVPR

SEQ ID NO: 16046 - protein, 15 aa, synthetic construct
LRPEAPRAAAPVGPR

SEQ ID NO: 16047 - protein, 15 aa, synthetic construct
LRPNCPRGSRKTAVC

SEQ ID NO: 16048 - protein, 15 aa, synthetic construct
LRPPRGLRPRAMPKT

SEQ ID NO: 16049 - protein, 15 aa, synthetic construct
LRPQGPQLGQQDSGA

SEQ ID NO: 16050 - protein, 15 aa, synthetic construct
LRPRAGARAAAPAAR

SEQ ID NO: 16051 - protein, 15 aa, synthetic construct
LRPRAGTAAGSAMRA

SEQ ID NO: 16052 - protein, 15 aa, synthetic construct
LRPRGADRPALRGGR

SEQ ID NO: 16053 - protein, 15 aa, synthetic construct
LRPRHAGRGHLLGPL

SEQ ID NO: 16054 - protein, 15 aa, synthetic construct
LRPRLAPQPFRLAEC

SEQ ID NO: 16055 - protein, 15 aa, synthetic construct
LRPRPRAALGPGRGL

SEQ ID NO: 16056 - protein, 15 aa, synthetic construct
LRPSAAARRIRRRSP

SEQ ID NO: 16057 - protein, 15 aa, synthetic construct
LRPTPPMPMAMVTRR

SEQ ID NO: 16058 - protein, 15 aa, synthetic construct
LRPWPAAAGEPRPAR

SEQ ID NO: 16059 - protein, 15 aa, synthetic construct
LRQEPRAIPHRQLEA

SEQ ID NO: 16060 - protein, 15 aa, synthetic construct
LRQGAPRERAAGQGQ

SEQ ID NO: 16061 - protein, 15 aa, synthetic construct
LRQPAGEIPALLLQH

SEQ ID NO: 16062 - protein, 15 aa, synthetic construct
LRREAAAPGLRRPRG

SEQ ID NO: 16063 - protein, 15 aa, synthetic construct
LRRESSAPPGSRDPG

SEQ ID NO: 16064 - protein, 15 aa, synthetic construct
LRRGARQDRRQPAVD

SEQ ID NO: 16065 - protein, 15 aa, synthetic construct
LRRGGARAEHPQPAA

SEQ ID NO: 16066 - protein, 15 aa, synthetic construct
LRRGGRKLPLRVGGL

SEQ ID NO: 16067 - protein, 15 aa, synthetic construct
LRRGRRARRPGRTAG

SEQ ID NO: 16068 - protein, 15 aa, synthetic construct
LRRGRRERAGAGGLV

SEQ ID NO: 16069 - protein, 15 aa, synthetic construct
LRRGRRGRGRRGPRE

SEQ ID NO: 16070 - protein, 15 aa, synthetic construct
LRRGRVHGLGEGGLG

SEQ ID NO: 16071 - protein, 15 aa, synthetic construct
LRRPRRGVLGIPVRL

SEQ ID NO: 16072 - protein, 15 aa, synthetic construct
LRRPRRRLHQRGPSL

SEQ ID NO: 16073 - protein, 15 aa, synthetic construct
LRRRRPRSRPTASPR

SEQ ID NO: 16074 - protein, 15 aa, synthetic construct
LRRRRRALRHTCQLH

SEQ ID NO: 16075 - protein, 15 aa, synthetic construct
LRRSRAPRGRRRRPH

SEQ ID NO: 16076 - protein, 15 aa, synthetic construct
LRSGANRTPTPAPPS

SEQ ID NO: 16077 - protein, 15 aa, synthetic construct
LRSGAVAAAEARRAS

SEQ ID NO: 16078 - protein, 15 aa, synthetic construct
LRSGGRLSLGTSRPC

SEQ ID NO: 16079 - protein, 15 aa, synthetic construct
LRSPSAATRRCFCSS

SEQ ID NO: 16080 - protein, 15 aa, synthetic construct
LRVGIIRKELPTEVV

SEQ ID NO: 16081 - protein, 15 aa, synthetic construct
LRVGPRAGSLRHRAL

SEQ ID NO: 16082 - protein, 15 aa, synthetic construct
LRVRTRPLGRGARRG

SEQ ID NO: 16083 - protein, 15 aa, synthetic construct
LSAAAARLPKEMPGA

SEQ ID NO: 16084 - protein, 15 aa, synthetic construct
LSAACSAGTPVAGLQ

SEQ ID NO: 16085 - protein, 15 aa, synthetic construct
LSAAGGQATPVPGGG

SEQ ID NO: 16086 - protein, 15 aa, synthetic construct
LSAASWRCAHCAPSP

SEQ ID NO: 16087 - protein, 15 aa, synthetic construct
LSAGEAAAEAEAGLG

SEQ ID NO: 16088 - protein, 15 aa, synthetic construct
LSAPLSAPRGPRRGS

SEQ ID NO: 16089 - protein, 15 aa, synthetic construct
LSARWWPSAWCACPG

SEQ ID NO: 16090 - protein, 15 aa, synthetic construct
LSASAACPRPSATSC

SEQ ID NO: 16091 - protein, 15 aa, synthetic construct
LSDPADPGRVPGVCA

SEQ ID NO: 16092 - protein, 15 aa, synthetic construct
LSGPGPGGDVRSARR

SEQ ID NO: 16093 - protein, 15 aa, synthetic construct
LSGRYHPSSGVQPTT

SEQ ID NO: 16094 - protein, 15 aa, synthetic construct
LSHVPGDPPGEHSHH

SEQ ID NO: 16095 - protein, 15 aa, synthetic construct
LSLMEKDLGTTAHPR

SEQ ID NO: 16096 - protein, 15 aa, synthetic construct
LSLSATTTKPTLPSG

SEQ ID NO: 16097 - protein, 15 aa, synthetic construct
LSLWCWPCAGLRPGC

SEQ ID NO: 16098 - protein, 15 aa, synthetic construct
LSPHPEAQGRTSRRS

SEQ ID NO: 16099 - protein, 15 aa, synthetic construct
LSPQAPLPGPPDPAA

SEQ ID NO: 16100 - protein, 15 aa, synthetic construct
LSQLSGALLVAAVSS

SEQ ID NO: 16101 - protein, 15 aa, synthetic construct
LSRPGMCLGDARVWE

SEQ ID NO: 16102 - protein, 15 aa, synthetic construct
LSSIHSPCWGMGSSL

SEQ ID NO: 16103 - protein, 15 aa, synthetic construct
LSSLTLGRFAMGDSL

SEQ ID NO: 16104 - protein, 15 aa, synthetic construct
LSSPILDNPGGQCDH

SEQ ID NO: 16105 - protein, 15 aa, synthetic construct
LSTFANREGHHTGQT

SEQ ID NO: 16106 - protein, 15 aa, synthetic construct
LSTPELGRHPRPLYA

SEQ ID NO: 16107 - protein, 15 aa, synthetic construct
LTAASPAAVSPTAAS

SEQ ID NO: 16108 - protein, 15 aa, synthetic construct
LTAGRGRAGLLRGAR

SEQ ID NO: 16109 - protein, 15 aa, synthetic construct
LTKMRSTRSTSSPAS

SEQ ID NO: 16110 - protein, 15 aa, synthetic construct
LTRGRGRSGRGPSAR

SEQ ID NO: 16111 - protein, 15 aa, synthetic construct
LTRLVVGLRQGRQWE

SEQ ID NO: 16112 - protein, 15 aa, synthetic construct
LTTPWVTGLERASCY

SEQ ID NO: 16113 - protein, 15 aa, synthetic construct
LVASSSSVVGTSWSS

SEQ ID NO: 16114 - protein, 15 aa, synthetic construct
LVELGGSSGGRGLCH

SEQ ID NO: 16115 - protein, 15 aa, synthetic construct
LVGAPKGAVVPVGAP

SEQ ID NO: 16116 - protein, 15 aa, synthetic construct
LVGAPRGAVAPVGAP

SEQ ID NO: 16117 - protein, 15 aa, synthetic construct
LVGASAPQWQRGRPQ

SEQ ID NO: 16118 - protein, 15 aa, synthetic construct
LVGEARQCPERQRGG

SEQ ID NO: 16119 - protein, 15 aa, synthetic construct
LVHGAEQDEGDGRGV

SEQ ID NO: 16120 - protein, 15 aa, synthetic construct
LVPAARLHGPLHPPG

SEQ ID NO: 16121 - protein, 15 aa, synthetic construct
LVPATGLPEPLREAS

SEQ ID NO: 16122 - protein, 15 aa, synthetic construct
LVPGDLAPAPGYGAS

SEQ ID NO: 16123 - protein, 15 aa, synthetic construct
LVPVEWPHGPGKQPA

SEQ ID NO: 16124 - protein, 15 aa, synthetic construct
LVQGGQDGHRVALPH

SEQ ID NO: 16125 - protein, 15 aa, synthetic construct
LVREPPVGPSAPAPG

SEQ ID NO: 16126 - protein, 15 aa, synthetic construct
LVRGPGPSRAARDGA

SEQ ID NO: 16127 - protein, 15 aa, synthetic construct
LVRHPAPAAATRHSD

SEQ ID NO: 16128 - protein, 15 aa, synthetic construct
LVSPAASPNRLPGPK

SEQ ID NO: 16129 - protein, 15 aa, synthetic construct
LVWRLPKERNTSLCA

SEQ ID NO: 16130 - protein, 15 aa, synthetic construct
LWPLAGPPPADVVLL

SEQ ID NO: 16131 - protein, 15 aa, synthetic construct
LWRTFRRKASSTRMW

SEQ ID NO: 16132 - protein, 15 aa, synthetic construct
LWRVPPPLRGRRGRT

SEQ ID NO: 16133 - protein, 15 aa, synthetic construct
LWTSEPRWVLPSREA

SEQ ID NO: 16134 - protein, 15 aa, synthetic construct
MAGFGGHSLGEETPF

SEQ ID NO: 16135 - protein, 15 aa, synthetic construct
MAGPVIMKPTSMESL

SEQ ID NO: 16136 - protein, 15 aa, synthetic construct
MAGVATAAAGAWTQP

SEQ ID NO: 16137 - protein, 15 aa, synthetic construct
MALAVGAVAPAAVCP

SEQ ID NO: 16138 - protein, 15 aa, synthetic construct
MALSGSQCRACSPRI

SEQ ID NO: 16139 - protein, 15 aa, synthetic construct
MALVAPGVDLVSVVE

SEQ ID NO: 16140 - protein, 15 aa, synthetic construct
MAPSEQIPTVRLRGY

SEQ ID NO: 16141 - protein, 15 aa, synthetic construct
MARPAGNAVPTAGRR

SEQ ID NO: 16142 - protein, 15 aa, synthetic construct
MARRPGLSLRPAPGR

SEQ ID NO: 16143 - protein, 15 aa, synthetic construct
MAVVMELAMAVDMAL

SEQ ID NO: 16144 - protein, 15 aa, synthetic construct
MCAEGGPAVHAEDRR

SEQ ID NO: 16145 - protein, 15 aa, synthetic construct
MCREIPRLGIRGERG

SEQ ID NO: 16146 - protein, 15 aa, synthetic construct
MDMAAAAHLAMEDTG

SEQ ID NO: 16147 - protein, 15 aa, synthetic construct
MEATAHLLRKQCPSR

SEQ ID NO: 16148 - protein, 15 aa, synthetic construct
MEGVRAFSDDAEEGS

SEQ ID NO: 16149 - protein, 15 aa, synthetic construct
MEGVRAFSDNAEEGS

SEQ ID NO: 16150 - protein, 15 aa, synthetic construct
MESSPLSLQSLRRLG

SEQ ID NO: 16151 - protein, 15 aa, synthetic construct
METRTRAGTGKEPPC

SEQ ID NO: 16152 - protein, 15 aa, synthetic construct
MFPHPADGDDPPARR

SEQ ID NO: 16153 - protein, 15 aa, synthetic construct
MFVGSGWVQDVTPSS

SEQ ID NO: 16154 - protein, 15 aa, synthetic construct
MGLRTAGDSGGRAGK

SEQ ID NO: 16155 - protein, 15 aa, synthetic construct
MGPRARLRRGSARGP

SEQ ID NO: 16156 - protein, 15 aa, synthetic construct
MGRAGAMPPRAPGAP

SEQ ID NO: 16157 - protein, 15 aa, synthetic construct
MGRDTPPARAGTPTW

SEQ ID NO: 16158 - protein, 15 aa, synthetic construct
MISRGSWRRSRKCAN

SEQ ID NO: 16159 - protein, 15 aa, synthetic construct
MKAGLNPTLAAFPKR

SEQ ID NO: 16160 - protein, 15 aa, synthetic construct
MKTPSAPVHPLGMSS

SEQ ID NO: 16161 - protein, 15 aa, synthetic construct
MLGGRRAKPRGSWGS

SEQ ID NO: 16162 - protein, 15 aa, synthetic construct
MLGQDPDSTKPPIAH

SEQ ID NO: 16163 - protein, 15 aa, synthetic construct
MLTKSHSAANASSPR

SEQ ID NO: 16164 - protein, 15 aa, synthetic construct
MPHYLPLPRGPAGLQ

SEQ ID NO: 16165 - protein, 15 aa, synthetic construct
MPIVKHTWNQHGCSV

SEQ ID NO: 16166 - protein, 15 aa, synthetic construct
MPLPAPGPWQTHCFS

SEQ ID NO: 16167 - protein, 15 aa, synthetic construct
MPLPGLHQSLLQVVA

SEQ ID NO: 16168 - protein, 15 aa, synthetic construct
MPPTAARAMSEGRAC

SEQ ID NO: 16169 - protein, 15 aa, synthetic construct
MPSEVGDSGRGAGAR

SEQ ID NO: 16170 - protein, 15 aa, synthetic construct
MPTSPPREVGNRPTR

SEQ ID NO: 16171 - protein, 15 aa, synthetic construct
MRPHPTLSAAAAAGA

SEQ ID NO: 16172 - protein, 15 aa, synthetic construct
MRRTRRTRTARTARP

SEQ ID NO: 16173 - protein, 15 aa, synthetic construct
MRWRWTTPKMRGAAP

SEQ ID NO: 16174 - protein, 15 aa, synthetic construct
MSAAGFEAAHARAAR

SEQ ID NO: 16175 - protein, 15 aa, synthetic construct
MSCVHDDSAGKPPHH

SEQ ID NO: 16176 - protein, 15 aa, synthetic construct
MSGTASSATAPVLRA

SEQ ID NO: 16177 - protein, 15 aa, synthetic construct
MSTIPKRAVCPFSTQ

SEQ ID NO: 16178 - protein, 15 aa, synthetic construct
MSVYAGGRGPAKLCP

SEQ ID NO: 16179 - protein, 15 aa, synthetic construct
MTWIPGTGPRDSISP

SEQ ID NO: 16180 - protein, 15 aa, synthetic construct
MVAAATGNLALIPQS

SEQ ID NO: 16181 - protein, 15 aa, synthetic construct
NATCGPAEGAGGAAR

SEQ ID NO: 16182 - protein, 15 aa, synthetic construct
NCACARWPAPCTSCA

SEQ ID NO: 16183 - protein, 15 aa, synthetic construct
NDPLSELQRQIAQPG

SEQ ID NO: 16184 - protein, 15 aa, synthetic construct
NIPSTAYALEEYVPR

SEQ ID NO: 16185 - protein, 15 aa, synthetic construct
NKGSSTSLPLLPIEQ

SEQ ID NO: 16186 - protein, 15 aa, synthetic construct
NLHLDSSGPDSTEAA

SEQ ID NO: 16187 - protein, 15 aa, synthetic construct
NLHPGDHLTPGPDHQ

SEQ ID NO: 16188 - protein, 15 aa, synthetic construct
NLRPALRPLPEQLSI

SEQ ID NO: 16189 - protein, 15 aa, synthetic construct
NLSLILPQHLPPRLP

SEQ ID NO: 16190 - protein, 15 aa, synthetic construct
NMAAAPARSAEPQRR

SEQ ID NO: 16191 - protein, 15 aa, synthetic construct
NNVMLGEPRRELFFG

SEQ ID NO: 16192 - protein, 15 aa, synthetic construct
NPARSPGSVPPSLHD

SEQ ID NO: 16193 - protein, 15 aa, synthetic construct
NPGEDGGSRSEWALC

SEQ ID NO: 16194 - protein, 15 aa, synthetic construct
NPLVPAPAAVRPPVA

SEQ ID NO: 16195 - protein, 15 aa, synthetic construct
NPPAGTADPPLLPVS

SEQ ID NO: 16196 - protein, 15 aa, synthetic construct
NPPAVAPPAVRRPAA

SEQ ID NO: 16197 - protein, 15 aa, synthetic construct
NPRRPRPRGRSRRRR

SEQ ID NO: 16198 - protein, 15 aa, synthetic construct
NPRTPPGGRMPTTSW

SEQ ID NO: 16199 - protein, 15 aa, synthetic construct
NPSRGRPGGAVAAAA

SEQ ID NO: 16200 - protein, 15 aa, synthetic construct
NPWWPQEAHCRGERR

SEQ ID NO: 16201 - protein, 15 aa, synthetic construct
NQLRHRSDPERPRNP

SEQ ID NO: 16202 - protein, 15 aa, synthetic construct
NQQPDNHPPGDGPPD

SEQ ID NO: 16203 - protein, 15 aa, synthetic construct
NSGPGLSPSPQVSPR

SEQ ID NO: 16204 - protein, 15 aa, synthetic construct
NSLRRVLGAARRAGT

SEQ ID NO: 16205 - protein, 15 aa, synthetic construct
NSSVAPGPAGSEVLG

SEQ ID NO: 16206 - protein, 15 aa, synthetic construct
NTKVSPTLNGPSSLG

SEQ ID NO: 16207 - protein, 15 aa, synthetic construct
NTRPRTRRAPLRRPV

SEQ ID NO: 16208 - protein, 15 aa, synthetic construct
PAATAAGGGRRPRRA

SEQ ID NO: 16209 - protein, 15 aa, synthetic construct
PADPARRQRAGHPAG

SEQ ID NO: 16210 - protein, 15 aa, synthetic construct
PADPRHPEEHVRLDP

SEQ ID NO: 16211 - protein, 15 aa, synthetic construct
PAEASSSRPISASRR

SEQ ID NO: 16212 - protein, 15 aa, synthetic construct
PAERGRDRARAPPAS

SEQ ID NO: 16213 - protein, 15 aa, synthetic construct
PAERPGPRPLVPVPD

SEQ ID NO: 16214 - protein, 15 aa, synthetic construct
PAESGPFPAAVRGGS

SEQ ID NO: 16215 - protein, 15 aa, synthetic construct
PAETAGPAERGGRCD

SEQ ID NO: 16216 - protein, 15 aa, synthetic construct
PAEVENGAGRVSTRG

SEQ ID NO: 16217 - protein, 15 aa, synthetic construct
PAGDGGQEDGGEVLE

SEQ ID NO: 16218 - protein, 15 aa, synthetic construct
PAGRRRRRRGQQRRR

SEQ ID NO: 16219 - protein, 15 aa, synthetic construct
PALEVQEDTKAAAKC

SEQ ID NO: 16220 - protein, 15 aa, synthetic construct
PALFVHPAASQARVL

SEQ ID NO: 16221 - protein, 15 aa, synthetic construct
PALRAPVRPPASAAA

SEQ ID NO: 16222 - protein, 15 aa, synthetic construct
PAQESRLQHRPVADS

SEQ ID NO: 16223 - protein, 15 aa, synthetic construct
PAQVRQQVPGGLPKP

SEQ ID NO: 16224 - protein, 15 aa, synthetic construct
PAQVRRSGRLRSRSA

SEQ ID NO: 16225 - protein, 15 aa, synthetic construct
PARALGAARAAAVRG

SEQ ID NO: 16226 - protein, 15 aa, synthetic construct
PARARTRAPASSWES

SEQ ID NO: 16227 - protein, 15 aa, synthetic construct
PARDPRTAPRRLSRR

SEQ ID NO: 16228 - protein, 15 aa, synthetic construct
PARGASLEEPDSLSR

SEQ ID NO: 16229 - protein, 15 aa, synthetic construct
PARGLRRRRTRCGSE

SEQ ID NO: 16230 - protein, 15 aa, synthetic construct
PARKEPGTAHHQVRV

SEQ ID NO: 16231 - protein, 15 aa, synthetic construct
PARPKARPGRPTSLP

SEQ ID NO: 16232 - protein, 15 aa, synthetic construct
PARRGRLTWTRPGGN

SEQ ID NO: 16233 - protein, 15 aa, synthetic construct
PARRPGRLCRRRRGR

SEQ ID NO: 16234 - protein, 15 aa, synthetic construct
PARRPRRRRRRPCCS

SEQ ID NO: 16235 - protein, 15 aa, synthetic construct
PARRRHRVPSAGARG

SEQ ID NO: 16236 - protein, 15 aa, synthetic construct
PARRRRHQLPPACLF

SEQ ID NO: 16237 - protein, 15 aa, synthetic construct
PARRTGRQRREPPPS

SEQ ID NO: 16238 - protein, 15 aa, synthetic construct
PARSAARRAPRKSSS

SEQ ID NO: 16239 - protein, 15 aa, synthetic construct
PARSLSSLGWPATCG

SEQ ID NO: 16240 - protein, 15 aa, synthetic construct
PARVRKGSNGPRGSP

SEQ ID NO: 16241 - protein, 15 aa, synthetic construct
PARWRRRPPTGRPRS

SEQ ID NO: 16242 - protein, 15 aa, synthetic construct
PATATAGRLGAGHHG

SEQ ID NO: 16243 - protein, 15 aa, synthetic construct
PATDCPLRMGASSTG

SEQ ID NO: 16244 - protein, 15 aa, synthetic construct
PATGARAELPRGFAT

SEQ ID NO: 16245 - protein, 15 aa, synthetic construct
PATRRTRCRTSSAAW

SEQ ID NO: 16246 - protein, 15 aa, synthetic construct
PATRSSRRPRCAWAR

SEQ ID NO: 16247 - protein, 15 aa, synthetic construct
PAVELHRPALLSGPR

SEQ ID NO: 16248 - protein, 15 aa, synthetic construct
PAVGRPGHRACVVWL

SEQ ID NO: 16249 - protein, 15 aa, synthetic construct
PAWNPRPGEFPVVDC

SEQ ID NO: 16250 - protein, 15 aa, synthetic construct
PCARSGATAPTRAAG

SEQ ID NO: 16251 - protein, 15 aa, synthetic construct
PCDLPNHTGRQPVHD

SEQ ID NO: 16252 - protein, 15 aa, synthetic construct
PCGRSWPGCWGQAPR

SEQ ID NO: 16253 - protein, 15 aa, synthetic construct
PCKEPSTVSASSFLQ

SEQ ID NO: 16254 - protein, 15 aa, synthetic construct
PCPRALTATSTSGMP

SEQ ID NO: 16255 - protein, 15 aa, synthetic construct
PCPRRRRGRQRAGRR

SEQ ID NO: 16256 - protein, 15 aa, synthetic construct
PCQGQGVAPPLPCPG

SEQ ID NO: 16257 - protein, 15 aa, synthetic construct
PCRLRCPAETRVPGT

SEQ ID NO: 16258 - protein, 15 aa, synthetic construct
PCRPSARRRRPRRRA

SEQ ID NO: 16259 - protein, 15 aa, synthetic construct
PCSPGPGPAHGEGPE

SEQ ID NO: 16260 - protein, 15 aa, synthetic construct
PCSPSGRGRRGSLDG

SEQ ID NO: 16261 - protein, 15 aa, synthetic construct
PDEEAGEAARADGAD

SEQ ID NO: 16262 - protein, 15 aa, synthetic construct
PDLAGVLPAPAAGGP

SEQ ID NO: 16263 - protein, 15 aa, synthetic construct
PDLSECPQGGAGASQ

SEQ ID NO: 16264 - protein, 15 aa, synthetic construct
PDPESGSELSLISFP

SEQ ID NO: 16265 - protein, 15 aa, synthetic construct
PDPLFNSRGAGQKLG

SEQ ID NO: 16266 - protein, 15 aa, synthetic construct
PDPSPNLGGRPGGSG

SEQ ID NO: 16267 - protein, 15 aa, synthetic construct
PDPVPRHPLARAPGR

SEQ ID NO: 16268 - protein, 15 aa, synthetic construct
PDQLHRGAEPGAAAA

SEQ ID NO: 16269 - protein, 15 aa, synthetic construct
PDQRADSGRAPASGR

SEQ ID NO: 16270 - protein, 15 aa, synthetic construct
PDRLPPPGAHCRLRG

SEQ ID NO: 16271 - protein, 15 aa, synthetic construct
PDSRRQTLGPGPTLA

SEQ ID NO: 16272 - protein, 15 aa, synthetic construct
PDVAEAGVARHVLQL

SEQ ID NO: 16273 - protein, 15 aa, synthetic construct
PDVGTALLSDENRMT

SEQ ID NO: 16274 - protein, 15 aa, synthetic construct
PDVPAGPGTARRTAG

SEQ ID NO: 16275 - protein, 15 aa, synthetic construct
PEAAGRRRGHHPEQC

SEQ ID NO: 16276 - protein, 15 aa, synthetic construct
PEAARGEAPGWGEAA

SEQ ID NO: 16277 - protein, 15 aa, synthetic construct
PEAEEAALVAHAVGH

SEQ ID NO: 16278 - protein, 15 aa, synthetic construct
PEAERPGRHWGRPKA

SEQ ID NO: 16279 - protein, 15 aa, synthetic construct
PEAGGRAGPRRPPPR

SEQ ID NO: 16280 - protein, 15 aa, synthetic construct
PEAGGSWRGGHSSCR

SEQ ID NO: 16281 - protein, 15 aa, synthetic construct
PEAGHLCPQKSAALQ

SEQ ID NO: 16282 - protein, 15 aa, synthetic construct
PEAHCAQDSRHSQRA

SEQ ID NO: 16283 - protein, 15 aa, synthetic construct
PEARRTTGRRRSCWK

SEQ ID NO: 16284 - protein, 15 aa, synthetic construct
PEDHGRAEGAQDAGR

SEQ ID NO: 16285 - protein, 15 aa, synthetic construct
PEDPGPYLHPELHGP

SEQ ID NO: 16286 - protein, 15 aa, synthetic construct
PEEPQALRPAKAGSR

SEQ ID NO: 16287 - protein, 15 aa, synthetic construct
PEFPSRQDSAPPAGL

SEQ ID NO: 16288 - protein, 15 aa, synthetic construct
PEFTHQAPDAERDLP

SEQ ID NO: 16289 - protein, 15 aa, synthetic construct
PEGRAAERALQLPGG

SEQ ID NO: 16290 - protein, 15 aa, synthetic construct
PEHAGPRSRRGPGGR

SEQ ID NO: 16291 - protein, 15 aa, synthetic construct
PEHRRPGLPALLHPL

SEQ ID NO: 16292 - protein, 15 aa, synthetic construct
PEHYRPRQGPEPRGP

SEQ ID NO: 16293 - protein, 15 aa, synthetic construct
PEKHSPGPAATSTPD

SEQ ID NO: 16294 - protein, 15 aa, synthetic construct
PEKNSSPAAYRQAFE

SEQ ID NO: 16295 - protein, 15 aa, synthetic construct
PELHAAQRPVGGRGP

SEQ ID NO: 16296 - protein, 15 aa, synthetic construct
PELPERLKTVPLPVP

SEQ ID NO: 16297 - protein, 15 aa, synthetic construct
PENFPGAAHPGGRRG

SEQ ID NO: 16298 - protein, 15 aa, synthetic construct
PEPEDRVGAGQARGR

SEQ ID NO: 16299 - protein, 15 aa, synthetic construct
PEPGGGAHQRVQDHP

SEQ ID NO: 16300 - protein, 15 aa, synthetic construct
PEPGKTAPGASRELG

SEQ ID NO: 16301 - protein, 15 aa, synthetic construct
PEPGPGRREAPAAAR

SEQ ID NO: 16302 - protein, 15 aa, synthetic construct
PEPGQAAAASPSAAE

SEQ ID NO: 16303 - protein, 15 aa, synthetic construct
PEPPGFRRAPEPAPQ

SEQ ID NO: 16304 - protein, 15 aa, synthetic construct
PEPRGHGLQPAAHQR

SEQ ID NO: 16305 - protein, 15 aa, synthetic construct
PEPSAPRQPGFGGAG

SEQ ID NO: 16306 - protein, 15 aa, synthetic construct
PERGAVLLGGRAGQR

SEQ ID NO: 16307 - protein, 15 aa, synthetic construct
PERGLLGPRPGAGAA

SEQ ID NO: 16308 - protein, 15 aa, synthetic construct
PERLPRAPQRLRPGA

SEQ ID NO: 16309 - protein, 15 aa, synthetic construct
PERPAPHGEGDAEHR

SEQ ID NO: 16310 - protein, 15 aa, synthetic construct
PERRDHVPAAAVAAV

SEQ ID NO: 16311 - protein, 15 aa, synthetic construct
PERRFLPARPGARQL

SEQ ID NO: 16312 - protein, 15 aa, synthetic construct
PERRRRALPPPVAAT

SEQ ID NO: 16313 - protein, 15 aa, synthetic construct
PESHPRGRPGHPEAS

SEQ ID NO: 16314 - protein, 15 aa, synthetic construct
PESLPVAFSWAAGDP

SEQ ID NO: 16315 - protein, 15 aa, synthetic construct
PESVLPRLPGAGLLH

SEQ ID NO: 16316 - protein, 15 aa, synthetic construct
PEVQGRSLSPSAFGL

SEQ ID NO: 16317 - protein, 15 aa, synthetic construct
PEVSLPAQWVWAEAA

SEQ ID NO: 16318 - protein, 15 aa, synthetic construct
PFAAQQFRPAERSLA

SEQ ID NO: 16319 - protein, 15 aa, synthetic construct
PFALGAGDLADYRRP

SEQ ID NO: 16320 - protein, 15 aa, synthetic construct
PFGDQPQPRQRRPAP

SEQ ID NO: 16321 - protein, 15 aa, synthetic construct
PFGRRCSPPGRGAAA

SEQ ID NO: 16322 - protein, 15 aa, synthetic construct
PFLLPTAHHPAPGRT

SEQ ID NO: 16323 - protein, 15 aa, synthetic construct
PFLLQDASFRPTSST

SEQ ID NO: 16324 - protein, 15 aa, synthetic construct
PGAAGGRGQGPPGLA

SEQ ID NO: 16325 - protein, 15 aa, synthetic construct
PGAESGADPPGQHVP

SEQ ID NO: 16326 - protein, 15 aa, synthetic construct
PGAGGAVHAGSRRLR

SEQ ID NO: 16327 - protein, 15 aa, synthetic construct
PGAGGGGRRGRGRGR

SEQ ID NO: 16328 - protein, 15 aa, synthetic construct
PGARRRRQSRAGVHA

SEQ ID NO: 16329 - protein, 15 aa, synthetic construct
PGAVDLAEAVALPRH

SEQ ID NO: 16330 - protein, 15 aa, synthetic construct
PGCGGAGGQGPAPGG

SEQ ID NO: 16331 - protein, 15 aa, synthetic construct
PGCPLRALHRREEPA

SEQ ID NO: 16332 - protein, 15 aa, synthetic construct
PGDGDAVAVPGGPDR

SEQ ID NO: 16333 - protein, 15 aa, synthetic construct
PGDLGPGLGTCGRGS

SEQ ID NO: 16334 - protein, 15 aa, synthetic construct
PGDLPNHTGRQPVHD

SEQ ID NO: 16335 - protein, 15 aa, synthetic construct
PGDLPPDHNGKPDAA

SEQ ID NO: 16336 - protein, 15 aa, synthetic construct
PGDPAARGANLRWRG

SEQ ID NO: 16337 - protein, 15 aa, synthetic construct
PGDRDRAGRRQDPLG

SEQ ID NO: 16338 - protein, 15 aa, synthetic construct
PGDSMPGAARDGGHA

SEQ ID NO: 16339 - protein, 15 aa, synthetic construct
PGEAASPARVRAQRA

SEQ ID NO: 16340 - protein, 15 aa, synthetic construct
PGECFETTGSDCYGS

SEQ ID NO: 16341 - protein, 15 aa, synthetic construct
PGEERQPEPAGSVPA

SEQ ID NO: 16342 - protein, 15 aa, synthetic construct
PGERGAEAEPGARHP

SEQ ID NO: 16343 - protein, 15 aa, synthetic construct
PGEWTTAQRAAVSPP

SEQ ID NO: 16344 - protein, 15 aa, synthetic construct
PGGAAALDPGGGRGG

SEQ ID NO: 16345 - protein, 15 aa, synthetic construct
PGGDHRDHSGGRGGG

SEQ ID NO: 16346 - protein, 15 aa, synthetic construct
PGGDLAERAEGHGHQ

SEQ ID NO: 16347 - protein, 15 aa, synthetic construct
PGGGGHQPGGGDSGV

SEQ ID NO: 16348 - protein, 15 aa, synthetic construct
PGGRPGRSPSRGAGR

SEQ ID NO: 16349 - protein, 15 aa, synthetic construct
PGGRQGRAAPRLLRA

SEQ ID NO: 16350 - protein, 15 aa, synthetic construct
PGGSGGRRRCRAAAR

SEQ ID NO: 16351 - protein, 15 aa, synthetic construct
PGGSRVRDSAPTALA

SEQ ID NO: 16352 - protein, 15 aa, synthetic construct
PGGVGADRKSGSKAG

SEQ ID NO: 16353 - protein, 15 aa, synthetic construct
PGHGHPPDQAGPGAP

SEQ ID NO: 16354 - protein, 15 aa, synthetic construct
PGHQDKAPQSQRSTG

SEQ ID NO: 16355 - protein, 15 aa, synthetic construct
PGHRGPAAPAAAPAS

SEQ ID NO: 16356 - protein, 15 aa, synthetic construct
PGHRSAGGAGGQDRG

SEQ ID NO: 16357 - protein, 15 aa, synthetic construct
PGHRVRAAHLGAGRL

SEQ ID NO: 16358 - protein, 15 aa, synthetic construct
PGKEQASNRYKSGGI

SEQ ID NO: 16359 - protein, 15 aa, synthetic construct
PGKHHRRRLHHEDAG

SEQ ID NO: 16360 - protein, 15 aa, synthetic construct
PGKRGAEAEPGARHP

SEQ ID NO: 16361 - protein, 15 aa, synthetic construct
PGKVWRRSKRGKMPA

SEQ ID NO: 16362 - protein, 15 aa, synthetic construct
PGPASRHLAPGRHRP

SEQ ID NO: 16363 - protein, 15 aa, synthetic construct
PGPERSRLGLGVSLH

SEQ ID NO: 16364 - protein, 15 aa, synthetic construct
PGPGLCHRRSLGPQT

SEQ ID NO: 16365 - protein, 15 aa, synthetic construct
PGPGNPHSLTAVPPG

SEQ ID NO: 16366 - protein, 15 aa, synthetic construct
PGPGRRAVGWTIAAG

SEQ ID NO: 16367 - protein, 15 aa, synthetic construct
PGPHSVSLQPARERP

SEQ ID NO: 16368 - protein, 15 aa, synthetic construct
PGPRNLAASSQRFPC

SEQ ID NO: 16369 - protein, 15 aa, synthetic construct
PGPRPGRVREALQRR

SEQ ID NO: 16370 - protein, 15 aa, synthetic construct
PGPRRRRTRPRGPRA

SEQ ID NO: 16371 - protein, 15 aa, synthetic construct
PGPRTARRRLAAGAR

SEQ ID NO: 16372 - protein, 15 aa, synthetic construct
PGPSRDTVMATVRGA

SEQ ID NO: 16373 - protein, 15 aa, synthetic construct
PGQAAGEVHPADLPK

SEQ ID NO: 16374 - protein, 15 aa, synthetic construct
PGQARQEGQPQRAVL

SEQ ID NO: 16375 - protein, 15 aa, synthetic construct
PGQEGGGQGQEGQGQ

SEQ ID NO: 16376 - protein, 15 aa, synthetic construct
PGQEHPRRAAVHEPG

SEQ ID NO: 16377 - protein, 15 aa, synthetic construct
PGQGARAEAFQISGK

SEQ ID NO: 16378 - protein, 15 aa, synthetic construct
PGQLDALGGGLLGAR

SEQ ID NO: 16379 - protein, 15 aa, synthetic construct
PGQPAGPGAAGALGA

SEQ ID NO: 16380 - protein, 15 aa, synthetic construct
PGQRLEPLLQDHRGP

SEQ ID NO: 16381 - protein, 15 aa, synthetic construct
PGRAAAASAADDHLA

SEQ ID NO: 16382 - protein, 15 aa, synthetic construct
PGRAGAAGGSPGGAG

SEQ ID NO: 16383 - protein, 15 aa, synthetic construct
PGRAGGTEVREPAGS

SEQ ID NO: 16384 - protein, 15 aa, synthetic construct
PGRDPRPCAPEPARP

SEQ ID NO: 16385 - protein, 15 aa, synthetic construct
PGRGERGAPAGAPAQ

SEQ ID NO: 16386 - protein, 15 aa, synthetic construct
PGRGLPTGGGGLAAA

SEQ ID NO: 16387 - protein, 15 aa, synthetic construct
PGRPEKPAGEGAGPT

SEQ ID NO: 16388 - protein, 15 aa, synthetic construct
PGRRAGGGGGGGGRE

SEQ ID NO: 16389 - protein, 15 aa, synthetic construct
PGRRAGRRGRRGRLG

SEQ ID NO: 16390 - protein, 15 aa, synthetic construct
PGRRAGSPGTAAVAG

SEQ ID NO: 16391 - protein, 15 aa, synthetic construct
PGRRRRSPSEGPGRG

SEQ ID NO: 16392 - protein, 15 aa, synthetic construct
PGRSAPGPARFSTHG

SEQ ID NO: 16393 - protein, 15 aa, synthetic construct
PGRWTTAQRAAVSSP

SEQ ID NO: 16394 - protein, 15 aa, synthetic construct
PGSASKLLGATATEA

SEQ ID NO: 16395 - protein, 15 aa, synthetic construct
PGSDHGREADPHGGL

SEQ ID NO: 16396 - protein, 15 aa, synthetic construct
PGSGGCQAVPHQLCA

SEQ ID NO: 16397 - protein, 15 aa, synthetic construct
PGSGGGGGGAGGRGG

SEQ ID NO: 16398 - protein, 15 aa, synthetic construct
PGSRRNPRPSRTHRR

SEQ ID NO: 16399 - protein, 15 aa, synthetic construct
PGSRRRCRRGPGLRA

SEQ ID NO: 16400 - protein, 15 aa, synthetic construct
PGSRRSPQTLRPRAG

SEQ ID NO: 16401 - protein, 15 aa, synthetic construct
PGSTQSPPGRRGELG

SEQ ID NO: 16402 - protein, 15 aa, synthetic construct
PGSYSCRRRPATPTR

SEQ ID NO: 16403 - protein, 15 aa, synthetic construct
PGTAAGEAAARGSCA

SEQ ID NO: 16404 - protein, 15 aa, synthetic construct
PGTSCPGAPGRAARG

SEQ ID NO: 16405 - protein, 15 aa, synthetic construct
PGTSSSTWAAAACAW

SEQ ID NO: 16406 - protein, 15 aa, synthetic construct
PGVLHGAHQRDGAGA

SEQ ID NO: 16407 - protein, 15 aa, synthetic construct
PGVPSAGRATSRHSG

SEQ ID NO: 16408 - protein, 15 aa, synthetic construct
PGWPSSARPACTSTT

SEQ ID NO: 16409 - protein, 15 aa, synthetic construct
PHGAAARPSGRRDPQ

SEQ ID NO: 16410 - protein, 15 aa, synthetic construct
PHGNERRAAGPGGLG

SEQ ID NO: 16411 - protein, 15 aa, synthetic construct
PHQPLPVLLPDPGAV

SEQ ID NO: 16412 - protein, 15 aa, synthetic construct
PHQRPHQARGPGRRA

SEQ ID NO: 16413 - protein, 15 aa, synthetic construct
PHRAAAAASGPYAKG

SEQ ID NO: 16414 - protein, 15 aa, synthetic construct
PHRAQPGGDLQQELL

SEQ ID NO: 16415 - protein, 15 aa, synthetic construct
PHRASPAPPPPRVQL

SEQ ID NO: 16416 - protein, 15 aa, synthetic construct
PHRPSGVEDAPLCAI

SEQ ID NO: 16417 - protein, 15 aa, synthetic construct
PHRQRGFRPGHRDRI

SEQ ID NO: 16418 - protein, 15 aa, synthetic construct
PHTPAPSPLFVPPQP

SEQ ID NO: 16419 - protein, 15 aa, synthetic construct
PHVGDSGDESVVGGD

SEQ ID NO: 16420 - protein, 15 aa, synthetic construct
PKAAESEREPKSEQE

SEQ ID NO: 16421 - protein, 15 aa, synthetic construct
PKAATPSLARRALCP

SEQ ID NO: 16422 - protein, 15 aa, synthetic construct
PKADSTGSLRQTLHF

SEQ ID NO: 16423 - protein, 15 aa, synthetic construct
PKARPPRRRRSAASA

SEQ ID NO: 16424 - protein, 15 aa, synthetic construct
PKRARLQDLKRAPHS

SEQ ID NO: 16425 - protein, 15 aa, synthetic construct
PKSSRNAAGAAVPAA

SEQ ID NO: 16426 - protein, 15 aa, synthetic construct
PLAGPGAWGCGVPGP

SEQ ID NO: 16427 - protein, 15 aa, synthetic construct
PLASASTRSSTARTR

SEQ ID NO: 16428 - protein, 15 aa, synthetic construct
PLGLPGAVRGAAAGA

SEQ ID NO: 16429 - protein, 15 aa, synthetic construct
PLLSRPGPAAARRPL

SEQ ID NO: 16430 - protein, 15 aa, synthetic construct
PLNAFPPQHALWPVS

SEQ ID NO: 16431 - protein, 15 aa, synthetic construct
PLQRREPVPSWGAGT

SEQ ID NO: 16432 - protein, 15 aa, synthetic construct
PLRAAAAAPAAQPMA

SEQ ID NO: 16433 - protein, 15 aa, synthetic construct
PLRGGESPVGGGAGG

SEQ ID NO: 16434 - protein, 15 aa, synthetic construct
PLRGRGQHRRQSAGA

SEQ ID NO: 16435 - protein, 15 aa, synthetic construct
PLRLGVETQVASIQP

SEQ ID NO: 16436 - protein, 15 aa, synthetic construct
PLRSRSPVRLCGRRS

SEQ ID NO: 16437 - protein, 15 aa, synthetic construct
PLRVHPAAERQEAHP

SEQ ID NO: 16438 - protein, 15 aa, synthetic construct
PLSGPPLRPTPPPSS

SEQ ID NO: 16439 - protein, 15 aa, synthetic construct
PLSRPRQGAAAALPS

SEQ ID NO: 16440 - protein, 15 aa, synthetic construct
PLSTRQGDQTHLQQL

SEQ ID NO: 16441 - protein, 15 aa, synthetic construct
PMGEQRAGVQLAEPG

SEQ ID NO: 16442 - protein, 15 aa, synthetic construct
PMSCSPPACPTSVSS

SEQ ID NO: 16443 - protein, 15 aa, synthetic construct
PNCVPGAGLRVSLTD

SEQ ID NO: 16444 - protein, 15 aa, synthetic construct
PNPRAGDGAAGAGPA

SEQ ID NO: 16445 - protein, 15 aa, synthetic construct
PNQSQVLRTEAGRAP

SEQ ID NO: 16446 - protein, 15 aa, synthetic construct
PNRRRPPHPLPRSPR

SEQ ID NO: 16447 - protein, 15 aa, synthetic construct
PNSSRRRRRRPRPPR

SEQ ID NO: 16448 - protein, 15 aa, synthetic construct
PPCAGSVCDAGRRPV

SEQ ID NO: 16449 - protein, 15 aa, synthetic construct
PPCPPLASPVPTTPA

SEQ ID NO: 16450 - protein, 15 aa, synthetic construct
PPCRSRPRRRRRHRR

SEQ ID NO: 16451 - protein, 15 aa, synthetic construct
PPDLAQAHKTPLSRA

SEQ ID NO: 16452 - protein, 15 aa, synthetic construct
PPEAGGGQTGRGAVL

SEQ ID NO: 16453 - protein, 15 aa, synthetic construct
PPEDTHSHPGHQLGP

SEQ ID NO: 16454 - protein, 15 aa, synthetic construct
PPEPGGGAARPAARG

SEQ ID NO: 16455 - protein, 15 aa, synthetic construct
PPGCGDERGGSDGWR

SEQ ID NO: 16456 - protein, 15 aa, synthetic construct
PPGGSAASEEREEGP

SEQ ID NO: 16457 - protein, 15 aa, synthetic construct
PPGIHRPSRTPGPPL

SEQ ID NO: 16458 - protein, 15 aa, synthetic construct
PPGQPYKSDTGYTPE

SEQ ID NO: 16459 - protein, 15 aa, synthetic construct
PPHHLPRTCSSSSVP

SEQ ID NO: 16460 - protein, 15 aa, synthetic construct
PPHKKPGWWQQLKLM

SEQ ID NO: 16461 - protein, 15 aa, synthetic construct
PPLCGDIGRCCDRRP

SEQ ID NO: 16462 - protein, 15 aa, synthetic construct
PPLDHSDSMVGEPAL

SEQ ID NO: 16463 - protein, 15 aa, synthetic construct
PPLEEGSASCPRENP

SEQ ID NO: 16464 - protein, 15 aa, synthetic construct
PPLGSESPAGPGRAP

SEQ ID NO: 16465 - protein, 15 aa, synthetic construct
PPLHHGALGAAGGAG

SEQ ID NO: 16466 - protein, 15 aa, synthetic construct
PPLQEHAPAAAPATL

SEQ ID NO: 16467 - protein, 15 aa, synthetic construct
PPLRASARPSRTRDL

SEQ ID NO: 16468 - protein, 15 aa, synthetic construct
PPLREAAPAAGHRPA

SEQ ID NO: 16469 - protein, 15 aa, synthetic construct
PPLRSVGRAACGCPP

SEQ ID NO: 16470 - protein, 15 aa, synthetic construct
PPPAGTPSASVPSSS

SEQ ID NO: 16471 - protein, 15 aa, synthetic construct
PPPARPARPASRRCR

SEQ ID NO: 16472 - protein, 15 aa, synthetic construct
PPPLESLSGCGLGEA

SEQ ID NO: 16473 - protein, 15 aa, synthetic construct
PPPPLLFLQPQPQPP

SEQ ID NO: 16474 - protein, 15 aa, synthetic construct
PPPPPAHDRSAAAGH

SEQ ID NO: 16475 - protein, 15 aa, synthetic construct
PPPPPCRRWGCERPP

SEQ ID NO: 16476 - protein, 15 aa, synthetic construct
PPPPSRRKNRLASCN

SEQ ID NO: 16477 - protein, 15 aa, synthetic construct
PPPRPPSSAPSEQRR

SEQ ID NO: 16478 - protein, 15 aa, synthetic construct
PPQGAEGGGSQSRRR

SEQ ID NO: 16479 - protein, 15 aa, synthetic construct
PPQRRLQDAGPRHPR

SEQ ID NO: 16480 - protein, 15 aa, synthetic construct
PPQVVGHPAASPAAA

SEQ ID NO: 16481 - protein, 15 aa, synthetic construct
PPRCPPPPPPPRRQR

SEQ ID NO: 16482 - protein, 15 aa, synthetic construct
PPRDLGGGLDSGVQS

SEQ ID NO: 16483 - protein, 15 aa, synthetic construct
PPRDLPDHRVPPRDL

SEQ ID NO: 16484 - protein, 15 aa, synthetic construct
PPREPGTQRVSAGRL

SEQ ID NO: 16485 - protein, 15 aa, synthetic construct
PPRGDVVPAGGDLPA

SEQ ID NO: 16486 - protein, 15 aa, synthetic construct
PPRGLCQNCRRPPPR

SEQ ID NO: 16487 - protein, 15 aa, synthetic construct
PPRHSLRTSELQPQG

SEQ ID NO: 16488 - protein, 15 aa, synthetic construct
PPRLQPLHRVQGVLQ

SEQ ID NO: 16489 - protein, 15 aa, synthetic construct
PPRLSALGRPPSMPL

SEQ ID NO: 16490 - protein, 15 aa, synthetic construct
PPRNPPHSEMRRSWG

SEQ ID NO: 16491 - protein, 15 aa, synthetic construct
PPRNPRHRRRRPLLR

SEQ ID NO: 16492 - protein, 15 aa, synthetic construct
PPRPAADSGRGGEPR

SEQ ID NO: 16493 - protein, 15 aa, synthetic construct
PPRPPSRPAPSTARE

SEQ ID NO: 16494 - protein, 15 aa, synthetic construct
PPRQLQLPHLPLSLS

SEQ ID NO: 16495 - protein, 15 aa, synthetic construct
PPRRSAPRRSLAPGG

SEQ ID NO: 16496 - protein, 15 aa, synthetic construct
PPRSLSFPICKLRTL

SEQ ID NO: 16497 - protein, 15 aa, synthetic construct
PPRTMRRCRGPRRTR

SEQ ID NO: 16498 - protein, 15 aa, synthetic construct
PPTGVGAWGSCPHPL

SEQ ID NO: 16499 - protein, 15 aa, synthetic construct
PPTSRLCAERAAGLG

SEQ ID NO: 16500 - protein, 15 aa, synthetic construct
PPVGLGEVRVFGREA

SEQ ID NO: 16501 - protein, 15 aa, synthetic construct
PPVPSAASSNLSTCT

SEQ ID NO: 16502 - protein, 15 aa, synthetic construct
PPWRWSSNAAASDSA

SEQ ID NO: 16503 - protein, 15 aa, synthetic construct
PPYPRWPSTTCLAAS

SEQ ID NO: 16504 - protein, 15 aa, synthetic construct
PQAALRGRGDHVARA

SEQ ID NO: 16505 - protein, 15 aa, synthetic construct
PQAAVRGVRPHLRAD

SEQ ID NO: 16506 - protein, 15 aa, synthetic construct
PQAEADANPETQQCT

SEQ ID NO: 16507 - protein, 15 aa, synthetic construct
PQAEGKTRRRRRRRK

SEQ ID NO: 16508 - protein, 15 aa, synthetic construct
PQAGDCAEGGGIGGA

SEQ ID NO: 16509 - protein, 15 aa, synthetic construct
PQAGSDALRPGPDQQ

SEQ ID NO: 16510 - protein, 15 aa, synthetic construct
PQALRGLRRGRGTAA

SEQ ID NO: 16511 - protein, 15 aa, synthetic construct
PQAQLEAPLRAAGDP

SEQ ID NO: 16512 - protein, 15 aa, synthetic construct
PQAQRQDFAAGWGGE

SEQ ID NO: 16513 - protein, 15 aa, synthetic construct
PQAVDPAASPAAAIP

SEQ ID NO: 16514 - protein, 15 aa, synthetic construct
PQAVGHPAASPAAVS

SEQ ID NO: 16515 - protein, 15 aa, synthetic construct
PQDAARAPGARRQPR

SEQ ID NO: 16516 - protein, 15 aa, synthetic construct
PQEPGARGRGGGRPQ

SEQ ID NO: 16517 - protein, 15 aa, synthetic construct
PQEVERGGHVELGRG

SEQ ID NO: 16518 - protein, 15 aa, synthetic construct
PQGDGLPPHPEANRN

SEQ ID NO: 16519 - protein, 15 aa, synthetic construct
PQGDRLPLRGRELLE

SEQ ID NO: 16520 - protein, 15 aa, synthetic construct
PQGGGGDPRRGARAL

SEQ ID NO: 16521 - protein, 15 aa, synthetic construct
PQGGHPKGAECPRRG

SEQ ID NO: 16522 - protein, 15 aa, synthetic construct
PQGQDHFPGEQTAFA

SEQ ID NO: 16523 - protein, 15 aa, synthetic construct
PQGVREDQAAQPTAQ

SEQ ID NO: 16524 - protein, 15 aa, synthetic construct
PQHAEPVAAAGAAQQ

SEQ ID NO: 16525 - protein, 15 aa, synthetic construct
PQHVPGHCPGEPAHH

SEQ ID NO: 16526 - protein, 15 aa, synthetic construct
PQLGGEWHRRLGSAA

SEQ ID NO: 16527 - protein, 15 aa, synthetic construct
PQLRTTLRCQEVEPL

SEQ ID NO: 16528 - protein, 15 aa, synthetic construct
PQNRRESPQSRVWQV

SEQ ID NO: 16529 - protein, 15 aa, synthetic construct
PQPGAAGDAARDPLH

SEQ ID NO: 16530 - protein, 15 aa, synthetic construct
PQPGEPPPVREPQPP

SEQ ID NO: 16531 - protein, 15 aa, synthetic construct
PQPRPPARTAAAPAA

SEQ ID NO: 16532 - protein, 15 aa, synthetic construct
PQPRSPSPSPSLPPV

SEQ ID NO: 16533 - protein, 15 aa, synthetic construct
PQPTANARPTTAPRG

SEQ ID NO: 16534 - protein, 15 aa, synthetic construct
PQPTAPWRAPRGQAP

SEQ ID NO: 16535 - protein, 15 aa, synthetic construct
PQQAAPPAGRGPAAR

SEQ ID NO: 16536 - protein, 15 aa, synthetic construct
PQQLRDPAQRLLQPL

SEQ ID NO: 16537 - protein, 15 aa, synthetic construct
PQQLRSPRAVPDPAG

SEQ ID NO: 16538 - protein, 15 aa, synthetic construct
PQRGALPLPLGEAAP

SEQ ID NO: 16539 - protein, 15 aa, synthetic construct
PQRGPQRRAGGGARR

SEQ ID NO: 16540 - protein, 15 aa, synthetic construct
PQRGRAAAMRPRSAA

SEQ ID NO: 16541 - protein, 15 aa, synthetic construct
PQRHESQPLGGRTEH

SEQ ID NO: 16542 - protein, 15 aa, synthetic construct
PQRPAEAGHQRVGAR

SEQ ID NO: 16543 - protein, 15 aa, synthetic construct
PQRPLGPSERAPAEA

SEQ ID NO: 16544 - protein, 15 aa, synthetic construct
PQRQGPDRREQPCKG

SEQ ID NO: 16545 - protein, 15 aa, synthetic construct
PQRRGRQAREGGSAR

SEQ ID NO: 16546 - protein, 15 aa, synthetic construct
PQSRPQNRPQNLPQS

SEQ ID NO: 16547 - protein, 15 aa, synthetic construct
PQTCSTTAASCGAAS

SEQ ID NO: 16548 - protein, 15 aa, synthetic construct
PQTKDLGAGLAKMAL

SEQ ID NO: 16549 - protein, 15 aa, synthetic construct
PQVVGHPAASPVAAI

SEQ ID NO: 16550 - protein, 15 aa, synthetic construct
PRAAPGLCPRPEPAA

SEQ ID NO: 16551 - protein, 15 aa, synthetic construct
PRAAQGGAAAGLPLQ

SEQ ID NO: 16552 - protein, 15 aa, synthetic construct
PRAARSWRRSGGEQS

SEQ ID NO: 16553 - protein, 15 aa, synthetic construct
PRAATAERTAPRAPH

SEQ ID NO: 16554 - protein, 15 aa, synthetic construct
PRAGGLARGAGGAWR

SEQ ID NO: 16555 - protein, 15 aa, synthetic construct
PRAGRAQFSCCPDPD

SEQ ID NO: 16556 - protein, 15 aa, synthetic construct
PRALGGGAAPARSAA

SEQ ID NO: 16557 - protein, 15 aa, synthetic construct
PRALLRGGSTQRQFG

SEQ ID NO: 16558 - protein, 15 aa, synthetic construct
PRAPCRPGSGSGSEP

SEQ ID NO: 16559 - protein, 15 aa, synthetic construct
PRAPVLGHAAEPRAE

SEQ ID NO: 16560 - protein, 15 aa, synthetic construct
PRAQRAAPAEAVEPR

SEQ ID NO: 16561 - protein, 15 aa, synthetic construct
PRARPAGATEQAARL

SEQ ID NO: 16562 - protein, 15 aa, synthetic construct
PRARPARGWMSALTA

SEQ ID NO: 16563 - protein, 15 aa, synthetic construct
PRARPGAPLQASGFE

SEQ ID NO: 16564 - protein, 15 aa, synthetic construct
PRARSSWSRSRRKSW

SEQ ID NO: 16565 - protein, 15 aa, synthetic construct
PRASALRDAGSLPHG

SEQ ID NO: 16566 - protein, 15 aa, synthetic construct
PRASGRAGLSGRGLG

SEQ ID NO: 16567 - protein, 15 aa, synthetic construct
PRASPTAGGKTASAA

SEQ ID NO: 16568 - protein, 15 aa, synthetic construct
PRAVAVGAQRSRGAA

SEQ ID NO: 16569 - protein, 15 aa, synthetic construct
PRAVHPARGTRFPRR

SEQ ID NO: 16570 - protein, 15 aa, synthetic construct
PRAWPGGRRRPGRPG

SEQ ID NO: 16571 - protein, 15 aa, synthetic construct
PRCADSGACGGRDSA

SEQ ID NO: 16572 - protein, 15 aa, synthetic construct
PRCPGGPGARPPAEE

SEQ ID NO: 16573 - protein, 15 aa, synthetic construct
PRDCTPSTESAAAFT

SEQ ID NO: 16574 - protein, 15 aa, synthetic construct
PRDGAAAEGDHPEPE

SEQ ID NO: 16575 - protein, 15 aa, synthetic construct
PRDRIPPPPLPRPAP

SEQ ID NO: 16576 - protein, 15 aa, synthetic construct
PREDGGDRQLPGAAQ

SEQ ID NO: 16577 - protein, 15 aa, synthetic construct
PRELCAAAPDPAPGR

SEQ ID NO: 16578 - protein, 15 aa, synthetic construct
PRGAALLPAPAGAAA

SEQ ID NO: 16579 - protein, 15 aa, synthetic construct
PRGALPTPGTSSRGG

SEQ ID NO: 16580 - protein, 15 aa, synthetic construct
PRGGLGLRPARSALR

SEQ ID NO: 16581 - protein, 15 aa, synthetic construct
PRGGSSAVDRGTTGP

SEQ ID NO: 16582 - protein, 15 aa, synthetic construct
PRGKTPGHMDAEVGW

SEQ ID NO: 16583 - protein, 15 aa, synthetic construct
PRGLVPRDLQPVARP

SEQ ID NO: 16584 - protein, 15 aa, synthetic construct
PRGPDEDGAAALLVF

SEQ ID NO: 16585 - protein, 15 aa, synthetic construct
PRGPLGEDPAHEQAG

SEQ ID NO: 16586 - protein, 15 aa, synthetic construct
PRGPQPRPRFGGAGQ

SEQ ID NO: 16587 - protein, 15 aa, synthetic construct
PRGQERAEAAAAPKS

SEQ ID NO: 16588 - protein, 15 aa, synthetic construct
PRGRGPRRRPGCARG

SEQ ID NO: 16589 - protein, 15 aa, synthetic construct
PRGRGWSRWLGGGCG

SEQ ID NO: 16590 - protein, 15 aa, synthetic construct
PRGRPRQSPPSRAGP

SEQ ID NO: 16591 - protein, 15 aa, synthetic construct
PRGRRGCGPALRSLR

SEQ ID NO: 16592 - protein, 15 aa, synthetic construct
PRGRRPPGPEEPPDA

SEQ ID NO: 16593 - protein, 15 aa, synthetic construct
PRGSRWLPSPPPCWP

SEQ ID NO: 16594 - protein, 15 aa, synthetic construct
PRGWREPELEPELAA

SEQ ID NO: 16595 - protein, 15 aa, synthetic construct
PRGWRNDSAPPLPPS

SEQ ID NO: 16596 - protein, 15 aa, synthetic construct
PRHERRPAADHGHHR

SEQ ID NO: 16597 - protein, 15 aa, synthetic construct
PRHRADLQRDRLSAG

SEQ ID NO: 16598 - protein, 15 aa, synthetic construct
PRHRGRGERGRAEEE

SEQ ID NO: 16599 - protein, 15 aa, synthetic construct
PRHVRQPPVPRHAAP

SEQ ID NO: 16600 - protein, 15 aa, synthetic construct
PRKEPKAAGARVAAG

SEQ ID NO: 16601 - protein, 15 aa, synthetic construct
PRKGAIALKAGGQAD

SEQ ID NO: 16602 - protein, 15 aa, synthetic construct
PRLCCSAPCPVPSTC

SEQ ID NO: 16603 - protein, 15 aa, synthetic construct
PRLGERARGHGVRLP

SEQ ID NO: 16604 - protein, 15 aa, synthetic construct
PRLGSYVHEDGRGPV

SEQ ID NO: 16605 - protein, 15 aa, synthetic construct
PRLPAAQRERDRAGG

SEQ ID NO: 16606 - protein, 15 aa, synthetic construct
PRLPAGAARCLAAPG

SEQ ID NO: 16607 - protein, 15 aa, synthetic construct
PRLPGSRRTRTRRVG

SEQ ID NO: 16608 - protein, 15 aa, synthetic construct
PRLPLQAWPGAPCAP

SEQ ID NO: 16609 - protein, 15 aa, synthetic construct
PRLRALPLAVARGGG

SEQ ID NO: 16610 - protein, 15 aa, synthetic construct
PRLWPAQGGPCSLSS

SEQ ID NO: 16611 - protein, 15 aa, synthetic construct
PRPALPPPPVPALQA

SEQ ID NO: 16612 - protein, 15 aa, synthetic construct
PRPAPGAASARSAAS

SEQ ID NO: 16613 - protein, 15 aa, synthetic construct
PRPAPTARPSSTRAC

SEQ ID NO: 16614 - protein, 15 aa, synthetic construct
PRPASGSHPLPLPLA

SEQ ID NO: 16615 - protein, 15 aa, synthetic construct
PRPGAGARLGLGLRA

SEQ ID NO: 16616 - protein, 15 aa, synthetic construct
PRPGFLKPTYPLLPP

SEQ ID NO: 16617 - protein, 15 aa, synthetic construct
PRPGPHQCQLPPVPG

SEQ ID NO: 16618 - protein, 15 aa, synthetic construct
PRPGQDAAAGPSGRL

SEQ ID NO: 16619 - protein, 15 aa, synthetic construct
PRPHYARHPQNPGPS

SEQ ID NO: 16620 - protein, 15 aa, synthetic construct
PRPLPLRCCRHSPRN

SEQ ID NO: 16621 - protein, 15 aa, synthetic construct
PRPPAAAPAAAPSPA

SEQ ID NO: 16622 - protein, 15 aa, synthetic construct
PRPPARSSSASATCS

SEQ ID NO: 16623 - protein, 15 aa, synthetic construct
PRPPATRGPRRRPRR

SEQ ID NO: 16624 - protein, 15 aa, synthetic construct
PRPPEELEHQVADVL

SEQ ID NO: 16625 - protein, 15 aa, synthetic construct
PRPPGPATQPREPSP

SEQ ID NO: 16626 - protein, 15 aa, synthetic construct
PRPPPAKTSNLELTA

SEQ ID NO: 16627 - protein, 15 aa, synthetic construct
PRPPRRPARSAVPRA

SEQ ID NO: 16628 - protein, 15 aa, synthetic construct
PRPRPPGPRRRPAPA

SEQ ID NO: 16629 - protein, 15 aa, synthetic construct
PRPRRRSPPPLPCRT

SEQ ID NO: 16630 - protein, 15 aa, synthetic construct
PRPSASSPPPSRLQP

SEQ ID NO: 16631 - protein, 15 aa, synthetic construct
PRPSDLCGLPRPGPR

SEQ ID NO: 16632 - protein, 15 aa, synthetic construct
PRPWPAGSVGASAAA

SEQ ID NO: 16633 - protein, 15 aa, synthetic construct
PRPWPASCAAARSPS

SEQ ID NO: 16634 - protein, 15 aa, synthetic construct
PRQGFCSQEALPGPW

SEQ ID NO: 16635 - protein, 15 aa, synthetic construct
PRQGSPSVRPGARAP

SEQ ID NO: 16636 - protein, 15 aa, synthetic construct
PRQHGQRARGAGVGR

SEQ ID NO: 16637 - protein, 15 aa, synthetic construct
PRQPLPRRPRRRRRP

SEQ ID NO: 16638 - protein, 15 aa, synthetic construct
PRQRPAPRDLGAHPQ

SEQ ID NO: 16639 - protein, 15 aa, synthetic construct
PRRAPRARPRRPQAA

SEQ ID NO: 16640 - protein, 15 aa, synthetic construct
PRRAWEPEAVPESLL

SEQ ID NO: 16641 - protein, 15 aa, synthetic construct
PRRCASPAPRAAPRP

SEQ ID NO: 16642 - protein, 15 aa, synthetic construct
PRRCRGPQRSSSSGW

SEQ ID NO: 16643 - protein, 15 aa, synthetic construct
PRRDLPQPGERQALR

SEQ ID NO: 16644 - protein, 15 aa, synthetic construct
PRRERRQEKCQPEEA

SEQ ID NO: 16645 - protein, 15 aa, synthetic construct
PRRGAEARAPPPAGA

SEQ ID NO: 16646 - protein, 15 aa, synthetic construct
PRRGAGARAATPKAA

SEQ ID NO: 16647 - protein, 15 aa, synthetic construct
PRRGAPAAALPAQPA

SEQ ID NO: 16648 - protein, 15 aa, synthetic construct
PRRGAPRRGRGGSLQ

SEQ ID NO: 16649 - protein, 15 aa, synthetic construct
PRRGGDPRARAPAPV

SEQ ID NO: 16650 - protein, 15 aa, synthetic construct
PRRLPAAGPAAAGGR

SEQ ID NO: 16651 - protein, 15 aa, synthetic construct
PRRLPARGARRGART

SEQ ID NO: 16652 - protein, 15 aa, synthetic construct
PRRLRLWPQPGSGAA

SEQ ID NO: 16653 - protein, 15 aa, synthetic construct
PRRLRSHRLQLRAPG

SEQ ID NO: 16654 - protein, 15 aa, synthetic construct
PRRPARQPRRGATAA

SEQ ID NO: 16655 - protein, 15 aa, synthetic construct
PRRPGAAAPAGSRLR

SEQ ID NO: 16656 - protein, 15 aa, synthetic construct
PRRPGTGWADPWGPP

SEQ ID NO: 16657 - protein, 15 aa, synthetic construct
PRRPPGDDAGVHGGE

SEQ ID NO: 16658 - protein, 15 aa, synthetic construct
PRRPPPDSTAALTRT

SEQ ID NO: 16659 - protein, 15 aa, synthetic construct
PRRPPSWVPPRACEA

SEQ ID NO: 16660 - protein, 15 aa, synthetic construct
PRRPRGPRPSLAARG

SEQ ID NO: 16661 - protein, 15 aa, synthetic construct
PRRPRPGARRRLLEP

SEQ ID NO: 16662 - protein, 15 aa, synthetic construct
PRRPRRPQAPDPGPP

SEQ ID NO: 16663 - protein, 15 aa, synthetic construct
PRRPSAPQEPHAVRA

SEQ ID NO: 16664 - protein, 15 aa, synthetic construct
PRRRARAHRQPQLPL

SEQ ID NO: 16665 - protein, 15 aa, synthetic construct
PRRRCRARRADGGRP

SEQ ID NO: 16666 - protein, 15 aa, synthetic construct
PRRRDPRPCAPPAAC

SEQ ID NO: 16667 - protein, 15 aa, synthetic construct
PRRRGAAPGPPLTPC

SEQ ID NO: 16668 - protein, 15 aa, synthetic construct
PRRRGCRTRRWPRWF

SEQ ID NO: 16669 - protein, 15 aa, synthetic construct
PRRRGPGAFLRWGSG

SEQ ID NO: 16670 - protein, 15 aa, synthetic construct
PRRRRAAETGCRGPG

SEQ ID NO: 16671 - protein, 15 aa, synthetic construct
PRRRRCGGAGTRGAA

SEQ ID NO: 16672 - protein, 15 aa, synthetic construct
PRRRRPRRRRRPRPP

SEQ ID NO: 16673 - protein, 15 aa, synthetic construct
PRRRRRLPAARSPAV

SEQ ID NO: 16674 - protein, 15 aa, synthetic construct
PRRRRRRPPAALHLH

SEQ ID NO: 16675 - protein, 15 aa, synthetic construct
PRRSRRRRPRSSSRS

SEQ ID NO: 16676 - protein, 15 aa, synthetic construct
PRRWRSARSKTPRAQ

SEQ ID NO: 16677 - protein, 15 aa, synthetic construct
PRSAEADAPRVAGRG

SEQ ID NO: 16678 - protein, 15 aa, synthetic construct
PRSCWRWGEGPEEAE

SEQ ID NO: 16679 - protein, 15 aa, synthetic construct
PRSPRLPLQFPREQR

SEQ ID NO: 16680 - protein, 15 aa, synthetic construct
PRSPSRTRAPGEGGP

SEQ ID NO: 16681 - protein, 15 aa, synthetic construct
PRTATAATNSASSPG

SEQ ID NO: 16682 - protein, 15 aa, synthetic construct
PRTPAKESKRASHRQ

SEQ ID NO: 16683 - protein, 15 aa, synthetic construct
PRTTWSAPQPGGTPT

SEQ ID NO: 16684 - protein, 15 aa, synthetic construct
PRTWDPHRQAKSRAR

SEQ ID NO: 16685 - protein, 15 aa, synthetic construct
PRVPVAQAPGGGGER

SEQ ID NO: 16686 - protein, 15 aa, synthetic construct
PRWPGAAAETPGSPG

SEQ ID NO: 16687 - protein, 15 aa, synthetic construct
PRWRRRRGGPRGVRA

SEQ ID NO: 16688 - protein, 15 aa, synthetic construct
PSALTESPPRNLWRG

SEQ ID NO: 16689 - protein, 15 aa, synthetic construct
PSDQPPSGAYADACC

SEQ ID NO: 16690 - protein, 15 aa, synthetic construct
PSFSKSLGGKGLLDA

SEQ ID NO: 16691 - protein, 15 aa, synthetic construct
PSGAAALRGHPRRRG

SEQ ID NO: 16692 - protein, 15 aa, synthetic construct
PSGRYAQPPWSSAWP

SEQ ID NO: 16693 - protein, 15 aa, synthetic construct
PSIATSPLPFPPARR

SEQ ID NO: 16694 - protein, 15 aa, synthetic construct
PSLAAVSPCAASVRS

SEQ ID NO: 16695 - protein, 15 aa, synthetic construct
PSLPAVARRGATAAG

SEQ ID NO: 16696 - protein, 15 aa, synthetic construct
PSLPPMPQHPGWAGM

SEQ ID NO: 16697 - protein, 15 aa, synthetic construct
PSPAKRQPVVAEAVP

SEQ ID NO: 16698 - protein, 15 aa, synthetic construct
PSPARAPRARPSPRP

SEQ ID NO: 16699 - protein, 15 aa, synthetic construct
PSPGRGRRPRLGRAP

SEQ ID NO: 16700 - protein, 15 aa, synthetic construct
PSPRRGPNPSASRGH

SEQ ID NO: 16701 - protein, 15 aa, synthetic construct
PSPSPLTTCSAVSAA

SEQ ID NO: 16702 - protein, 15 aa, synthetic construct
PSPVRGRRHPVRERS

SEQ ID NO: 16703 - protein, 15 aa, synthetic construct
PSQRPQPSREGAPGR

SEQ ID NO: 16704 - protein, 15 aa, synthetic construct
PSQVALGAVLASGDL

SEQ ID NO: 16705 - protein, 15 aa, synthetic construct
PSRAPVTPEALRRGG

SEQ ID NO: 16706 - protein, 15 aa, synthetic construct
PSRPPPGACPRGGPT

SEQ ID NO: 16707 - protein, 15 aa, synthetic construct
PSRPRGTAAGQSRGL

SEQ ID NO: 16708 - protein, 15 aa, synthetic construct
PSRPSRRWWKRRGAA

SEQ ID NO: 16709 - protein, 15 aa, synthetic construct
PSRREPGGDAAHPGP

SEQ ID NO: 16710 - protein, 15 aa, synthetic construct
PSRRGDEITRKPGEV

SEQ ID NO: 16711 - protein, 15 aa, synthetic construct
PSRSLALHPPAHQAA

SEQ ID NO: 16712 - protein, 15 aa, synthetic construct
PSRTAPAAWSCPPRP

SEQ ID NO: 16713 - protein, 15 aa, synthetic construct
PSRTRRRGDSTSGAS

SEQ ID NO: 16714 - protein, 15 aa, synthetic construct
PSRVLAHPRRSPDSG

SEQ ID NO: 16715 - protein, 15 aa, synthetic construct
PSRVRGEAELTDTRR

SEQ ID NO: 16716 - protein, 15 aa, synthetic construct
PSSDSPTGHCRLSAR

SEQ ID NO: 16717 - protein, 15 aa, synthetic construct
PSSGPTCRIPTSSRS

SEQ ID NO: 16718 - protein, 15 aa, synthetic construct
PSSLSTPATSPALST

SEQ ID NO: 16719 - protein, 15 aa, synthetic construct
PSSTPARTGAAWPSG

SEQ ID NO: 16720 - protein, 15 aa, synthetic construct
PSTACASSASVAALC

SEQ ID NO: 16721 - protein, 15 aa, synthetic construct
PSTRASSRAGRRWAR

SEQ ID NO: 16722 - protein, 15 aa, synthetic construct
PSTRGRMAPATGLRG

SEQ ID NO: 16723 - protein, 15 aa, synthetic construct
PSTRRPPSTRAPRRS

SEQ ID NO: 16724 - protein, 15 aa, synthetic construct
PSVARGPHVPGPFRA

SEQ ID NO: 16725 - protein, 15 aa, synthetic construct
PSVPRPHEWRSFLLL

SEQ ID NO: 16726 - protein, 15 aa, synthetic construct
PSVRRPGGPPRPCSQ

SEQ ID NO: 16727 - protein, 15 aa, synthetic construct
PSVSAEVPGCCRGEA

SEQ ID NO: 16728 - protein, 15 aa, synthetic construct
PSWAPRSPLAPPWRA

SEQ ID NO: 16729 - protein, 15 aa, synthetic construct
PSWGQCCFRRERRGA

SEQ ID NO: 16730 - protein, 15 aa, synthetic construct
PTAGRRCGAPRLCSQ

SEQ ID NO: 16731 - protein, 15 aa, synthetic construct
PTAIGVAALGPMIPT

SEQ ID NO: 16732 - protein, 15 aa, synthetic construct
PTCTTASSTACACSR

SEQ ID NO: 16733 - protein, 15 aa, synthetic construct
PTEPAPAAARAAAPP

SEQ ID NO: 16734 - protein, 15 aa, synthetic construct
PTGAGAARRGAAARR

SEQ ID NO: 16735 - protein, 15 aa, synthetic construct
PTLRAAARKGRSPRR

SEQ ID NO: 16736 - protein, 15 aa, synthetic construct
PTPMESQRKLTETQM

SEQ ID NO: 16737 - protein, 15 aa, synthetic construct
PTPRPSLPAGTCPPG

SEQ ID NO: 16738 - protein, 15 aa, synthetic construct
PTPSGRAGGAREKPV

SEQ ID NO: 16739 - protein, 15 aa, synthetic construct
PTRASAAWPCWAPSS

SEQ ID NO: 16740 - protein, 15 aa, synthetic construct
PTRELGARWDAGLSG

SEQ ID NO: 16741 - protein, 15 aa, synthetic construct
PTRGQTQWECDPAPR

SEQ ID NO: 16742 - protein, 15 aa, synthetic construct
PTRPCPGASGTGSAP

SEQ ID NO: 16743 - protein, 15 aa, synthetic construct
PTRPSSAPPASGPSA

SEQ ID NO: 16744 - protein, 15 aa, synthetic construct
PTRRSPRPGAPRRLP

SEQ ID NO: 16745 - protein, 15 aa, synthetic construct
PTSRPASCGASAAAS

SEQ ID NO: 16746 - protein, 15 aa, synthetic construct
PTTGSSSAPCPASSS

SEQ ID NO: 16747 - protein, 15 aa, synthetic construct
PTTRPSCPTCWATRT

SEQ ID NO: 16748 - protein, 15 aa, synthetic construct
PTTWRPARRRRGSAP

SEQ ID NO: 16749 - protein, 15 aa, synthetic construct
PVGGPRGAVAPVGGP

SEQ ID NO: 16750 - protein, 15 aa, synthetic construct
PVLRSPKSFPGQGRG

SEQ ID NO: 16751 - protein, 15 aa, synthetic construct
PVRAAGPPHLRAPLG

SEQ ID NO: 16752 - protein, 15 aa, synthetic construct
PVRGRDANPSVPTAD

SEQ ID NO: 16753 - protein, 15 aa, synthetic construct
PVRKHRLLPAHPHVL

SEQ ID NO: 16754 - protein, 15 aa, synthetic construct
PVVAGAAGSVGGQRG

SEQ ID NO: 16755 - protein, 15 aa, synthetic construct
PVVEAGLAPGAPWSR

SEQ ID NO: 16756 - protein, 15 aa, synthetic construct
PWAAKPTAPGGRGTA

SEQ ID NO: 16757 - protein, 15 aa, synthetic construct
PWAASPSNSLQTRFQ

SEQ ID NO: 16758 - protein, 15 aa, synthetic construct
PWAEPGSCGPGTNPP

SEQ ID NO: 16759 - protein, 15 aa, synthetic construct
PWHLAPSAPVAAAAS

SEQ ID NO: 16760 - protein, 15 aa, synthetic construct
PWHPAPPAHGAPLAR

SEQ ID NO: 16761 - protein, 15 aa, synthetic construct
PWPASDGGPDSGDRP

SEQ ID NO: 16762 - protein, 15 aa, synthetic construct
PWPGPLPRRGAPQEP

SEQ ID NO: 16763 - protein, 15 aa, synthetic construct
PWPSGGRRKGSGSAE

SEQ ID NO: 16764 - protein, 15 aa, synthetic construct
PWRPKPWQGAGPTAG

SEQ ID NO: 16765 - protein, 15 aa, synthetic construct
PWTCCPASTEPAAAP

SEQ ID NO: 16766 - protein, 15 aa, synthetic construct
PWWEAAQEDFQALGF

SEQ ID NO: 16767 - protein, 15 aa, synthetic construct
PWWEAAQEDSQTHSF

SEQ ID NO: 16768 - protein, 15 aa, synthetic construct
PYPSHPPNTGSTCND

SEQ ID NO: 16769 - protein, 15 aa, synthetic construct
QAAGAGHLAAGAAAD

SEQ ID NO: 16770 - protein, 15 aa, synthetic construct
QAALPPKHITGTLPL

SEQ ID NO: 16771 - protein, 15 aa, synthetic construct
QAEDHLLQPAAAAPK

SEQ ID NO: 16772 - protein, 15 aa, synthetic construct
QAEGGEDEAGRAHTE

SEQ ID NO: 16773 - protein, 15 aa, synthetic construct
QAGAAHLPRPLLPLH

SEQ ID NO: 16774 - protein, 15 aa, synthetic construct
QAGPAGLPQAGRAAA

SEQ ID NO: 16775 - protein, 15 aa, synthetic construct
QAGPGRTPLPLHGSG

SEQ ID NO: 16776 - protein, 15 aa, synthetic construct
QAGPQDRARSLAGSG

SEQ ID NO: 16777 - protein, 15 aa, synthetic construct
QAGQAAEHHQPVHPQ

SEQ ID NO: 16778 - protein, 15 aa, synthetic construct
QAGRPPERKNGPMRC

SEQ ID NO: 16779 - protein, 15 aa, synthetic construct
QALPEPVVAARAPGV

SEQ ID NO: 16780 - protein, 15 aa, synthetic construct
QALPPGVRGAGSLRD

SEQ ID NO: 16781 - protein, 15 aa, synthetic construct
QAPAQVSASPPRPRR

SEQ ID NO: 16782 - protein, 15 aa, synthetic construct
QAPLPGSARPALLPL

SEQ ID NO: 16783 - protein, 15 aa, synthetic construct
QAPPHQSGERRGRWG

SEQ ID NO: 16784 - protein, 15 aa, synthetic construct
QAPTAAARRSGGRVM

SEQ ID NO: 16785 - protein, 15 aa, synthetic construct
QAQSRDPGAAEPIQE

SEQ ID NO: 16786 - protein, 15 aa, synthetic construct
QARPSRAARRQRARG

SEQ ID NO: 16787 - protein, 15 aa, synthetic construct
QARRPPRTTATATLS

SEQ ID NO: 16788 - protein, 15 aa, synthetic construct
QARVAPGAAPGAACQ

SEQ ID NO: 16789 - protein, 15 aa, synthetic construct
QASTRHAHEGAPRLQ

SEQ ID NO: 16790 - protein, 15 aa, synthetic construct
QAVAPGEQPALPLHP

SEQ ID NO: 16791 - protein, 15 aa, synthetic construct
QAVRALPDPVPAGAG

SEQ ID NO: 16792 - protein, 15 aa, synthetic construct
QCDAHAAAGAAAPAA

SEQ ID NO: 16793 - protein, 15 aa, synthetic construct
QCPRTTDPPLYLVHL

SEQ ID NO: 16794 - protein, 15 aa, synthetic construct
QCQSDLRRTAGPPND

SEQ ID NO: 16795 - protein, 15 aa, synthetic construct
QDAQLGDQQTPRCRM

SEQ ID NO: 16796 - protein, 15 aa, synthetic construct
QDDRPQLTGGRGKSG

SEQ ID NO: 16797 - protein, 15 aa, synthetic construct
QDEPGGELHHQRLPH

SEQ ID NO: 16798 - protein, 15 aa, synthetic construct
QDFFLCPGHPGPTEI

SEQ ID NO: 16799 - protein, 15 aa, synthetic construct
QDLARGGQLPQSHPE

SEQ ID NO: 16800 - protein, 15 aa, synthetic construct
QDLPRSFPESVPERA

SEQ ID NO: 16801 - protein, 15 aa, synthetic construct
QDPPGAAPGRGVPGQ

SEQ ID NO: 16802 - protein, 15 aa, synthetic construct
QDPPGAQDLPCRGPF

SEQ ID NO: 16803 - protein, 15 aa, synthetic construct
QDPQLPNPARRHQAA

SEQ ID NO: 16804 - protein, 15 aa, synthetic construct
QDPRRQLPRRQSRGK

SEQ ID NO: 16805 - protein, 15 aa, synthetic construct
QDPSTSLGGSSAVRG

SEQ ID NO: 16806 - protein, 15 aa, synthetic construct
QDPVRGRGAQLGKGA

SEQ ID NO: 16807 - protein, 15 aa, synthetic construct
QDQEEALRSAESEAV

SEQ ID NO: 16808 - protein, 15 aa, synthetic construct
QDREVCHRQEQEGGP

SEQ ID NO: 16809 - protein, 15 aa, synthetic construct
QDRYKLWHRLDVLYR

SEQ ID NO: 16810 - protein, 15 aa, synthetic construct
QDSATTPSRPPGRPR

SEQ ID NO: 16811 - protein, 15 aa, synthetic construct
QEAARARGRGRGRDP

SEQ ID NO: 16812 - protein, 15 aa, synthetic construct
QEEAQERRGGGERQA

SEQ ID NO: 16813 - protein, 15 aa, synthetic construct
QEEEAPTAARGAPLQ

SEQ ID NO: 16814 - protein, 15 aa, synthetic construct
QEEEGRGGGGRHGDP

SEQ ID NO: 16815 - protein, 15 aa, synthetic construct
QEEIREGLRDRGAAE

SEQ ID NO: 16816 - protein, 15 aa, synthetic construct
QEGGSGGRQRHAAQA

SEQ ID NO: 16817 - protein, 15 aa, synthetic construct
QEKFGGGRSGERCQL

SEQ ID NO: 16818 - protein, 15 aa, synthetic construct
QEKGEGEGGEGGRGG

SEQ ID NO: 16819 - protein, 15 aa, synthetic construct
QEKNKLPTGTSLEEF

SEQ ID NO: 16820 - protein, 15 aa, synthetic construct
QELFQAKHPPQPQLH

SEQ ID NO: 16821 - protein, 15 aa, synthetic construct
QEPAGPEGQGARGVP

SEQ ID NO: 16822 - protein, 15 aa, synthetic construct
QEPGAWRCPSLTGSS

SEQ ID NO: 16823 - protein, 15 aa, synthetic construct
QEPLLPWGQPKPGAQ

SEQ ID NO: 16824 - protein, 15 aa, synthetic construct
QEPQQPLAPGAPPGH

SEQ ID NO: 16825 - protein, 15 aa, synthetic construct
QEPRAGRQKGRRGAR

SEQ ID NO: 16826 - protein, 15 aa, synthetic construct
QEPVRAVPPPGQRVL

SEQ ID NO: 16827 - protein, 15 aa, synthetic construct
QERSRQLWQSQPLQP

SEQ ID NO: 16828 - protein, 15 aa, synthetic construct
QESFIWCRNPGGAPV

SEQ ID NO: 16829 - protein, 15 aa, synthetic construct
QESSPERPFVGGPEQ

SEQ ID NO: 16830 - protein, 15 aa, synthetic construct
QEYLETGIACEAGRE

SEQ ID NO: 16831 - protein, 15 aa, synthetic construct
QFCMCPRSCDSLGDT

SEQ ID NO: 16832 - protein, 15 aa, synthetic construct
QFPAPRDTHNRGAVP

SEQ ID NO: 16833 - protein, 15 aa, synthetic construct
QFRWCPLATLPLFAK

SEQ ID NO: 16834 - protein, 15 aa, synthetic construct
QGAGGRAVARGAAPA

SEQ ID NO: 16835 - protein, 15 aa, synthetic construct
QGAIQEPGQRREPDH

SEQ ID NO: 16836 - protein, 15 aa, synthetic construct
QGAQEGGAARWEARE

SEQ ID NO: 16837 - protein, 15 aa, synthetic construct
QGCDTQAPHRLGKDG

SEQ ID NO: 16838 - protein, 15 aa, synthetic construct
QGCPEPVGPQWQPGE

SEQ ID NO: 16839 - protein, 15 aa, synthetic construct
QGDRGEEPAPGGPVP

SEQ ID NO: 16840 - protein, 15 aa, synthetic construct
QGEDPREVRARVGAA

SEQ ID NO: 16841 - protein, 15 aa, synthetic construct
QGEGGAGLGDAVQEG

SEQ ID NO: 16842 - protein, 15 aa, synthetic construct
QGERVRQQPEEEADL

SEQ ID NO: 16843 - protein, 15 aa, synthetic construct
QGEYPAVHLRPDQTC

SEQ ID NO: 16844 - protein, 15 aa, synthetic construct
QGFETILGNKARPSP

SEQ ID NO: 16845 - protein, 15 aa, synthetic construct
QGFNEESRPPAPPLS

SEQ ID NO: 16846 - protein, 15 aa, synthetic construct
QGGDPLRGHPLHHRH

SEQ ID NO: 16847 - protein, 15 aa, synthetic construct
QGGGGALRGARLPAL

SEQ ID NO: 16848 - protein, 15 aa, synthetic construct
QGGPAARRRAHPAGA

SEQ ID NO: 16849 - protein, 15 aa, synthetic construct
QGGQPDLPHLSRQLE

SEQ ID NO: 16850 - protein, 15 aa, synthetic construct
QGGVQQPGTRAGPAP

SEQ ID NO: 16851 - protein, 15 aa, synthetic construct
QGPATDPTSCSDSRG

SEQ ID NO: 16852 - protein, 15 aa, synthetic construct
QGPERPGEAGRAHLQ

SEQ ID NO: 16853 - protein, 15 aa, synthetic construct
QGPGGLLGRAGPAKQ

SEQ ID NO: 16854 - protein, 15 aa, synthetic construct
QGPPAWLPQPLVRVR

SEQ ID NO: 16855 - protein, 15 aa, synthetic construct
QGQLLDAGPGVGRHV

SEQ ID NO: 16856 - protein, 15 aa, synthetic construct
QGQWAEESWTWGPPF

SEQ ID NO: 16857 - protein, 15 aa, synthetic construct
QGRCPHSPHTGGPAP

SEQ ID NO: 16858 - protein, 15 aa, synthetic construct
QGRGGQEAGGPRGCG

SEQ ID NO: 16859 - protein, 15 aa, synthetic construct
QGRQLRGQERPQDTH

SEQ ID NO: 16860 - protein, 15 aa, synthetic construct
QGRRRRRGGRKWGRR

SEQ ID NO: 16861 - protein, 15 aa, synthetic construct
QGSVGRWGCEKKCIV

SEQ ID NO: 16862 - protein, 15 aa, synthetic construct
QGVAPVGSEPGPQPG

SEQ ID NO: 16863 - protein, 15 aa, synthetic construct
QGVCAREEGAATESP

SEQ ID NO: 16864 - protein, 15 aa, synthetic construct
QGVPVPGSGGPGQDP

SEQ ID NO: 16865 - protein, 15 aa, synthetic construct
QHAGQQRDPTGEPAG

SEQ ID NO: 16866 - protein, 15 aa, synthetic construct
QHSAPLAAAGPPLQG

SEQ ID NO: 16867 - protein, 15 aa, synthetic construct
QHSPARAHAAALQAA

SEQ ID NO: 16868 - protein, 15 aa, synthetic construct
QHVGPRRRDAVRHPD

SEQ ID NO: 16869 - protein, 15 aa, synthetic construct
QIKNFLIASRRPICF

SEQ ID NO: 16870 - protein, 15 aa, synthetic construct
QISGSACSVTRLSWS

SEQ ID NO: 16871 - protein, 15 aa, synthetic construct
QKAAAAEGVRREGAA

SEQ ID NO: 16872 - protein, 15 aa, synthetic construct
QKSLLQNMSPQNFQP

SEQ ID NO: 16873 - protein, 15 aa, synthetic construct
QLCAEPASSPAGAAG

SEQ ID NO: 16874 - protein, 15 aa, synthetic construct
QLGLPGTGAAPAAAA

SEQ ID NO: 16875 - protein, 15 aa, synthetic construct
QLGPPPPLPAWPPAA

SEQ ID NO: 16876 - protein, 15 aa, synthetic construct
QLGRLGEPRDRSGTA

SEQ ID NO: 16877 - protein, 15 aa, synthetic construct
QLGRPPRPAPPDPPP

SEQ ID NO: 16878 - protein, 15 aa, synthetic construct
QLLASVGDGGSVHRS

SEQ ID NO: 16879 - protein, 15 aa, synthetic construct
QLLGASPGSKDSGPC

SEQ ID NO: 16880 - protein, 15 aa, synthetic construct
QLPAGAAHGSPGAGG

SEQ ID NO: 16881 - protein, 15 aa, synthetic construct
QLPAGGGLRAARGVH

SEQ ID NO: 16882 - protein, 15 aa, synthetic construct
QLPGAALLPALPRQE

SEQ ID NO: 16883 - protein, 15 aa, synthetic construct
QLPPAAGRLLAGAQL

SEQ ID NO: 16884 - protein, 15 aa, synthetic construct
QLPPRRLELPGASAG

SEQ ID NO: 16885 - protein, 15 aa, synthetic construct
QLPQLPTGRADAARV

SEQ ID NO: 16886 - protein, 15 aa, synthetic construct
QLPRSAPCTTRPDSG

SEQ ID NO: 16887 - protein, 15 aa, synthetic construct
QLQGETESAGPSLGP

SEQ ID NO: 16888 - protein, 15 aa, synthetic construct
QLQPGPPRAQAAARR

SEQ ID NO: 16889 - protein, 15 aa, synthetic construct
QLRAAEPLQAAARCR

SEQ ID NO: 16890 - protein, 15 aa, synthetic construct
QLVANGGAGPRGRGA

SEQ ID NO: 16891 - protein, 15 aa, synthetic construct
QLVPASAAAPGRRAP

SEQ ID NO: 16892 - protein, 15 aa, synthetic construct
QNGGRERRARRAERQ

SEQ ID NO: 16893 - protein, 15 aa, synthetic construct
QNLTLPLDSGPHQSP

SEQ ID NO: 16894 - protein, 15 aa, synthetic construct
QNRPQNLPQSRPQNL

SEQ ID NO: 16895 - protein, 15 aa, synthetic construct
QPAALPGRLGPAARH

SEQ ID NO: 16896 - protein, 15 aa, synthetic construct
QPAGPRDHEGGAGAG

SEQ ID NO: 16897 - protein, 15 aa, synthetic construct
QPAGSDSGRRGQGPQ

SEQ ID NO: 16898 - protein, 15 aa, synthetic construct
QPAPAARRAAGRAAA

SEQ ID NO: 16899 - protein, 15 aa, synthetic construct
QPAPGLHRRGPLPGH

SEQ ID NO: 16900 - protein, 15 aa, synthetic construct
QPAPPRSAPARPRRV

SEQ ID NO: 16901 - protein, 15 aa, synthetic construct
QPAQDYQVHAAVLPA

SEQ ID NO: 16902 - protein, 15 aa, synthetic construct
QPAQGRLAASGTARE

SEQ ID NO: 16903 - protein, 15 aa, synthetic construct
QPAQRLHDRPAAARA

SEQ ID NO: 16904 - protein, 15 aa, synthetic construct
QPARDSAAALLEPQG

SEQ ID NO: 16905 - protein, 15 aa, synthetic construct
QPARLLRSLHCVGDL

SEQ ID NO: 16906 - protein, 15 aa, synthetic construct
QPASSSPLRGRVLSL

SEQ ID NO: 16907 - protein, 15 aa, synthetic construct
QPCGGDDDGPGASGR

SEQ ID NO: 16908 - protein, 15 aa, synthetic construct
QPCRLPDAVPLAGRV

SEQ ID NO: 16909 - protein, 15 aa, synthetic construct
QPCRRFLRPPTRPRR

SEQ ID NO: 16910 - protein, 15 aa, synthetic construct
QPDPECRRRCRRGPE

SEQ ID NO: 16911 - protein, 15 aa, synthetic construct
QPEEEEEAAAEEEED

SEQ ID NO: 16912 - protein, 15 aa, synthetic construct
QPEPDPDPRPLPAGP

SEQ ID NO: 16913 - protein, 15 aa, synthetic construct
QPGDRPQRAVREAGG

SEQ ID NO: 16914 - protein, 15 aa, synthetic construct
QPGGEAAARGGRGRA

SEQ ID NO: 16915 - protein, 15 aa, synthetic construct
QPGGGGSPAPVPGAA

SEQ ID NO: 16916 - protein, 15 aa, synthetic construct
QPGGIHGRLGCPGGR

SEQ ID NO: 16917 - protein, 15 aa, synthetic construct
QPGGPARAGGAPPSH

SEQ ID NO: 16918 - protein, 15 aa, synthetic construct
QPGGREQRQRRRRRR

SEQ ID NO: 16919 - protein, 15 aa, synthetic construct
QPGNPPAEREAQERS

SEQ ID NO: 16920 - protein, 15 aa, synthetic construct
QPGPLLGREPRAGVQ

SEQ ID NO: 16921 - protein, 15 aa, synthetic construct
QPGPRRAPGRPDEPA

SEQ ID NO: 16922 - protein, 15 aa, synthetic construct
QPHAGFPCVFFPGQP

SEQ ID NO: 16923 - protein, 15 aa, synthetic construct
QPIQQGKTQLCFLEG

SEQ ID NO: 16924 - protein, 15 aa, synthetic construct
QPLDSPPANARGLGL

SEQ ID NO: 16925 - protein, 15 aa, synthetic construct
QPLPQLQPQPAAQGL

SEQ ID NO: 16926 - protein, 15 aa, synthetic construct
QPLPTPVQSQLPAGA

SEQ ID NO: 16927 - protein, 15 aa, synthetic construct
QPLPVHAAGCCLPVG

SEQ ID NO: 16928 - protein, 15 aa, synthetic construct
QPLRMELDRVHAAEM

SEQ ID NO: 16929 - protein, 15 aa, synthetic construct
QPPAEPPARAQQRRL

SEQ ID NO: 16930 - protein, 15 aa, synthetic construct
QPPDPTGEKPLAGSL

SEQ ID NO: 16931 - protein, 15 aa, synthetic construct
QPPGGLAGPEGTDPC

SEQ ID NO: 16932 - protein, 15 aa, synthetic construct
QPPLFPLFAERRRVA

SEQ ID NO: 16933 - protein, 15 aa, synthetic construct
QPPNPAWPTLPSCSG

SEQ ID NO: 16934 - protein, 15 aa, synthetic construct
QPPRAAALRDARAPA

SEQ ID NO: 16935 - protein, 15 aa, synthetic construct
QPPRAAAVRRLGAAP

SEQ ID NO: 16936 - protein, 15 aa, synthetic construct
QPPWPPWPRSAPEAG

SEQ ID NO: 16937 - protein, 15 aa, synthetic construct
QPQPGQDRAQPGQQP

SEQ ID NO: 16938 - protein, 15 aa, synthetic construct
QPQPQRHPQPQPQPQ

SEQ ID NO: 16939 - protein, 15 aa, synthetic construct
QPQQRRALPVREARP

SEQ ID NO: 16940 - protein, 15 aa, synthetic construct
QPQRVRRLSGRLLRT

SEQ ID NO: 16941 - protein, 15 aa, synthetic construct
QPRGRPDRGAAPGQP

SEQ ID NO: 16942 - protein, 15 aa, synthetic construct
QPRPPRPPRRQAAGR

SEQ ID NO: 16943 - protein, 15 aa, synthetic construct
QPRTRRGVAPSGHPK

SEQ ID NO: 16944 - protein, 15 aa, synthetic construct
QPSAAAGSRSARARN

SEQ ID NO: 16945 - protein, 15 aa, synthetic construct
QPSARLPGSRVEAIP

SEQ ID NO: 16946 - protein, 15 aa, synthetic construct
QPSPGPDPHPGPAAG

SEQ ID NO: 16947 - protein, 15 aa, synthetic construct
QPSQRRPPGAAGHLC

SEQ ID NO: 16948 - protein, 15 aa, synthetic construct
QPSRAMSPWSLPAPL

SEQ ID NO: 16949 - protein, 15 aa, synthetic construct
QPVLLAQGAAAGEAS

SEQ ID NO: 16950 - protein, 15 aa, synthetic construct
QQAAPRRSRSSAGQA

SEQ ID NO: 16951 - protein, 15 aa, synthetic construct
QQAPVHGRHVHARDP

SEQ ID NO: 16952 - protein, 15 aa, synthetic construct
QQEHGRGGGGCSSGC

SEQ ID NO: 16953 - protein, 15 aa, synthetic construct
QQLPLPEQHGGERNH

SEQ ID NO: 16954 - protein, 15 aa, synthetic construct
QQPAAGQRGPREEMR

SEQ ID NO: 16955 - protein, 15 aa, synthetic construct
QQPDLLLGAVARPSP

SEQ ID NO: 16956 - protein, 15 aa, synthetic construct
QQPGASQASAPLPGP

SEQ ID NO: 16957 - protein, 15 aa, synthetic construct
QQQLRVRACGCEGEC

SEQ ID NO: 16958 - protein, 15 aa, synthetic construct
QQQRRPRRRRGAGGC

SEQ ID NO: 16959 - protein, 15 aa, synthetic construct
QQVPSSMPATRALAH

SEQ ID NO: 16960 - protein, 15 aa, synthetic construct
QRAAADAELAARALG

SEQ ID NO: 16961 - protein, 15 aa, synthetic construct
QRAACTDTSAGATVA

SEQ ID NO: 16962 - protein, 15 aa, synthetic construct
QRADADAFFLPRRNR

SEQ ID NO: 16963 - protein, 15 aa, synthetic construct
QRAEPSAASRPAPGA

SEQ ID NO: 16964 - protein, 15 aa, synthetic construct
QRAGVRQLAAPLGGP

SEQ ID NO: 16965 - protein, 15 aa, synthetic construct
QRAPMGSLPGHAETG

SEQ ID NO: 16966 - protein, 15 aa, synthetic construct
QRARRFRAAAGPPAA

SEQ ID NO: 16967 - protein, 15 aa, synthetic construct
QRARSNGRPAWNSSC

SEQ ID NO: 16968 - protein, 15 aa, synthetic construct
QRDPEIWRPREPLRL

SEQ ID NO: 16969 - protein, 15 aa, synthetic construct
QRDRALLAHRPGAQR

SEQ ID NO: 16970 - protein, 15 aa, synthetic construct
QREQRGQSGQEHHAA

SEQ ID NO: 16971 - protein, 15 aa, synthetic construct
QRETTRSSSNARNCS

SEQ ID NO: 16972 - protein, 15 aa, synthetic construct
QRGARRTADAGGDGL

SEQ ID NO: 16973 - protein, 15 aa, synthetic construct
QRGCMAGAQRGCRER

SEQ ID NO: 16974 - protein, 15 aa, synthetic construct
QRGGAVDLPVPGQGV

SEQ ID NO: 16975 - protein, 15 aa, synthetic construct
QRGLGPQPAAGAEPP

SEQ ID NO: 16976 - protein, 15 aa, synthetic construct
QRGPRQPRRDAGLPR

SEQ ID NO: 16977 - protein, 15 aa, synthetic construct
QRGVERGACWLPERS

SEQ ID NO: 16978 - protein, 15 aa, synthetic construct
QRHHRPQLVAGLGGL

SEQ ID NO: 16979 - protein, 15 aa, synthetic construct
QRLPPPLLPPLHLAA

SEQ ID NO: 16980 - protein, 15 aa, synthetic construct
QRPELQLRGSGDPAL

SEQ ID NO: 16981 - protein, 15 aa, synthetic construct
QRPLPPPPPPPPPLG

SEQ ID NO: 16982 - protein, 15 aa, synthetic construct
QRPRAPASCPPSGGP

SEQ ID NO: 16983 - protein, 15 aa, synthetic construct
QRPRPQRPGAFRSQR

SEQ ID NO: 16984 - protein, 15 aa, synthetic construct
QRQPLPAMEEEARGA

SEQ ID NO: 16985 - protein, 15 aa, synthetic construct
QRQQDQDQEEAFRVP

SEQ ID NO: 16986 - protein, 15 aa, synthetic construct
QRRAAGCRAQVEKLL

SEQ ID NO: 16987 - protein, 15 aa, synthetic construct
QRRAAGRGAAHAGTA

SEQ ID NO: 16988 - protein, 15 aa, synthetic construct
QRRAGPRRGQVQHER

SEQ ID NO: 16989 - protein, 15 aa, synthetic construct
QRRAPGAAGSGGRPR

SEQ ID NO: 16990 - protein, 15 aa, synthetic construct
QRRARRERRPGGPWR

SEQ ID NO: 16991 - protein, 15 aa, synthetic construct
QRRARSSSSSSSSSS

SEQ ID NO: 16992 - protein, 15 aa, synthetic construct
QRRDPEPQGAAAAGR

SEQ ID NO: 16993 - protein, 15 aa, synthetic construct
QRREPAKGRGPGPGE

SEQ ID NO: 16994 - protein, 15 aa, synthetic construct
QRRHRRRGRQRIAAA

SEQ ID NO: 16995 - protein, 15 aa, synthetic construct
QRRPKAQLERPSMRG

SEQ ID NO: 16996 - protein, 15 aa, synthetic construct
QRRRPRAAPRRRRRG

SEQ ID NO: 16997 - protein, 15 aa, synthetic construct
QRRRRRGRGRTAGRR

SEQ ID NO: 16998 - protein, 15 aa, synthetic construct
QRRRRRRWQAENNKP

SEQ ID NO: 16999 - protein, 15 aa, synthetic construct
QRRSRRSRRRRGTGP

SEQ ID NO: 17000 - protein, 15 aa, synthetic construct
QRRTSGSTPAAAGMR

SEQ ID NO: 17001 - protein, 15 aa, synthetic construct
QRTGSLCAAAAASEL

SEQ ID NO: 17002 - protein, 15 aa, synthetic construct
QRTRRTGREPWMPSV

SEQ ID NO: 17003 - protein, 15 aa, synthetic construct
QRVPGDNVGANFATS

SEQ ID NO: 17004 - protein, 15 aa, synthetic construct
QSLPGTQRERQCQRQ

SEQ ID NO: 17005 - protein, 15 aa, synthetic construct
QSLRWNRSPWTSAEL

SEQ ID NO: 17006 - protein, 15 aa, synthetic construct
QSRPRHGHCGRRPRG

SEQ ID NO: 17007 - protein, 15 aa, synthetic construct
QSRRFAVSPDVGASS

SEQ ID NO: 17008 - protein, 15 aa, synthetic construct
QSRRRRRPGSGWCRA

SEQ ID NO: 17009 - protein, 15 aa, synthetic construct
QSRTRSGGGERAAGR

SEQ ID NO: 17010 - protein, 15 aa, synthetic construct
QSRVRAPPLHSAVAS

SEQ ID NO: 17011 - protein, 15 aa, synthetic construct
QSVPLSALQSLPAAV

SEQ ID NO: 17012 - protein, 15 aa, synthetic construct
QSVPLSVLQSLPAAV

SEQ ID NO: 17013 - protein, 15 aa, synthetic construct
QVAAPGLAARRRRLL

SEQ ID NO: 17014 - protein, 15 aa, synthetic construct
QVCEQPSDKQYIPAQ

SEQ ID NO: 17015 - protein, 15 aa, synthetic construct
QVERLQEAEASAGPS

SEQ ID NO: 17016 - protein, 15 aa, synthetic construct
QVLGDPQLRRQDSLE

SEQ ID NO: 17017 - protein, 15 aa, synthetic construct
QVLGGHRAPGRPAAA

SEQ ID NO: 17018 - protein, 15 aa, synthetic construct
QVLNPAFREAGAHGS

SEQ ID NO: 17019 - protein, 15 aa, synthetic construct
QVMLVEIGILPAPKE

SEQ ID NO: 17020 - protein, 15 aa, synthetic construct
QVPARERPEGEPYLR

SEQ ID NO: 17021 - protein, 15 aa, synthetic construct
QVPLRSLDRTEPKPQ

SEQ ID NO: 17022 - protein, 15 aa, synthetic construct
QVPPRGEERVVRAAL

SEQ ID NO: 17023 - protein, 15 aa, synthetic construct
QVRHPSAGEPEHGET

SEQ ID NO: 17024 - protein, 15 aa, synthetic construct
QVRPPSTKEAGELLP

SEQ ID NO: 17025 - protein, 15 aa, synthetic construct
QVRRPDPRQELDSPH

SEQ ID NO: 17026 - protein, 15 aa, synthetic construct
QVVQSQAHQGSEGRR

SEQ ID NO: 17027 - protein, 15 aa, synthetic construct
QWEKKTKPLCPSLSS

SEQ ID NO: 17028 - protein, 15 aa, synthetic construct
QWGESSPHGGPGLPP

SEQ ID NO: 17029 - protein, 15 aa, synthetic construct
QWHRLWSWGRSGGSV

SEQ ID NO: 17030 - protein, 15 aa, synthetic construct
QWLPGRAVRVCGWPG

SEQ ID NO: 17031 - protein, 15 aa, synthetic construct
QWPRQPDSSLCAGRR

SEQ ID NO: 17032 - protein, 15 aa, synthetic construct
QWQRRRQREAGGAQG

SEQ ID NO: 17033 - protein, 15 aa, synthetic construct
QYAHPDQNAGGGLGG

SEQ ID NO: 17034 - protein, 15 aa, synthetic construct
RAAAAAEHGRAAAPD

SEQ ID NO: 17035 - protein, 15 aa, synthetic construct
RAAAAGGGPEPALPP

SEQ ID NO: 17036 - protein, 15 aa, synthetic construct
RAAALHPPAAGERAQ

SEQ ID NO: 17037 - protein, 15 aa, synthetic construct
RAAAPVAPWAVPSVP

SEQ ID NO: 17038 - protein, 15 aa, synthetic construct
RAACTRGHPSCSPAR

SEQ ID NO: 17039 - protein, 15 aa, synthetic construct
RAAEGGRGASGRGGG

SEQ ID NO: 17040 - protein, 15 aa, synthetic construct
RAAGATPAPAAPTAA

SEQ ID NO: 17041 - protein, 15 aa, synthetic construct
RAAGGGGRGGGWGVR

SEQ ID NO: 17042 - protein, 15 aa, synthetic construct
RAAGGRGAEEQEKEK

SEQ ID NO: 17043 - protein, 15 aa, synthetic construct
RAAGGRQVRGGGPRA

SEQ ID NO: 17044 - protein, 15 aa, synthetic construct
RAAGPARGGAGRGLG

SEQ ID NO: 17045 - protein, 15 aa, synthetic construct
RAAGPGAAGPGAAGP

SEQ ID NO: 17046 - protein, 15 aa, synthetic construct
RAAGPQPAAGPGPGA

SEQ ID NO: 17047 - protein, 15 aa, synthetic construct
RAAGTQAEVGARGRG

SEQ ID NO: 17048 - protein, 15 aa, synthetic construct
RAAKARADSSGRPCS

SEQ ID NO: 17049 - protein, 15 aa, synthetic construct
RAALLDPDAGQLEEP

SEQ ID NO: 17050 - protein, 15 aa, synthetic construct
RAALQHPAVHAEHDP

SEQ ID NO: 17051 - protein, 15 aa, synthetic construct
RAALRRPLLPPLAPS

SEQ ID NO: 17052 - protein, 15 aa, synthetic construct
RAAPARRRQCWRTRG

SEQ ID NO: 17053 - protein, 15 aa, synthetic construct
RAAPPRRRAGQHRRP

SEQ ID NO: 17054 - protein, 15 aa, synthetic construct
RAAPRGGGEAAAAAQ

SEQ ID NO: 17055 - protein, 15 aa, synthetic construct
RAAQEGVRDLSRQQE

SEQ ID NO: 17056 - protein, 15 aa, synthetic construct
RAAQRRRGAGRRAPA

SEQ ID NO: 17057 - protein, 15 aa, synthetic construct
RAARGGGRGGSGWGK

SEQ ID NO: 17058 - protein, 15 aa, synthetic construct
RAARKTCRWARGPRG

SEQ ID NO: 17059 - protein, 15 aa, synthetic construct
RAARQDPRAPGPAQP

SEQ ID NO: 17060 - protein, 15 aa, synthetic construct
RAARRDPAAPRRATL

SEQ ID NO: 17061 - protein, 15 aa, synthetic construct
RAARSWRARRRARRS

SEQ ID NO: 17062 - protein, 15 aa, synthetic construct
RAAVELDGLPGRPLC

SEQ ID NO: 17063 - protein, 15 aa, synthetic construct
RAAVSGLPAEPQRVG

SEQ ID NO: 17064 - protein, 15 aa, synthetic construct
RAAWVVQELPSLALP

SEQ ID NO: 17065 - protein, 15 aa, synthetic construct
RACGGCPGRRCLGGA

SEQ ID NO: 17066 - protein, 15 aa, synthetic construct
RACSGWRPRAAEAFW

SEQ ID NO: 17067 - protein, 15 aa, synthetic construct
RADLAEPAVRPAAPP

SEQ ID NO: 17068 - protein, 15 aa, synthetic construct
RADLGPGGWTRGAVG

SEQ ID NO: 17069 - protein, 15 aa, synthetic construct
RADLGVGPQLPAGVL

SEQ ID NO: 17070 - protein, 15 aa, synthetic construct
RADRDLHSAPAVSLC

SEQ ID NO: 17071 - protein, 15 aa, synthetic construct
RADSHLQNNRDWGLQ

SEQ ID NO: 17072 - protein, 15 aa, synthetic construct
RADTAPCRAGAPSAA

SEQ ID NO: 17073 - protein, 15 aa, synthetic construct
RADVPLGMAVPALTP

SEQ ID NO: 17074 - protein, 15 aa, synthetic construct
RAEAESGGAHRHSER

SEQ ID NO: 17075 - protein, 15 aa, synthetic construct
RAEDLPGQAGDAPDH

SEQ ID NO: 17076 - protein, 15 aa, synthetic construct
RAGAPGSGRDRAQEG

SEQ ID NO: 17077 - protein, 15 aa, synthetic construct
RAGARRPRAAGRAGR

SEQ ID NO: 17078 - protein, 15 aa, synthetic construct
RAGDQHQGGQGEQDA

SEQ ID NO: 17079 - protein, 15 aa, synthetic construct
RAGGRAAEPGPRALG

SEQ ID NO: 17080 - protein, 15 aa, synthetic construct
RAGGRGRREPPEEAG

SEQ ID NO: 17081 - protein, 15 aa, synthetic construct
RAGHAAAAGAGERAG

SEQ ID NO: 17082 - protein, 15 aa, synthetic construct
RAGLGEGLGDAQHGG

SEQ ID NO: 17083 - protein, 15 aa, synthetic construct
RAGLGGRRRGAGGFP

SEQ ID NO: 17084 - protein, 15 aa, synthetic construct
RAGLLAGDVDAQRDS

SEQ ID NO: 17085 - protein, 15 aa, synthetic construct
RAGPARRRPAGLRDP

SEQ ID NO: 17086 - protein, 15 aa, synthetic construct
RAGPEREGEAVGPRS

SEQ ID NO: 17087 - protein, 15 aa, synthetic construct
RAGQAAARPGPGGGG

SEQ ID NO: 17088 - protein, 15 aa, synthetic construct
RAGQRLLHGAARRGR

SEQ ID NO: 17089 - protein, 15 aa, synthetic construct
RAGRGAGGVGGAGHR

SEQ ID NO: 17090 - protein, 15 aa, synthetic construct
RAGSSPRPAAAASKR

SEQ ID NO: 17091 - protein, 15 aa, synthetic construct
RAGVPAEPEQAVGDG

SEQ ID NO: 17092 - protein, 15 aa, synthetic construct
RALALQSLRLAAGLG

SEQ ID NO: 17093 - protein, 15 aa, synthetic construct
RALAQRERPERGNAA

SEQ ID NO: 17094 - protein, 15 aa, synthetic construct
RALCPPGGDPGALLL

SEQ ID NO: 17095 - protein, 15 aa, synthetic construct
RALDADGSGDSGLGA

SEQ ID NO: 17096 - protein, 15 aa, synthetic construct
RALGRPGPGGGGGGG

SEQ ID NO: 17097 - protein, 15 aa, synthetic construct
RALLHGQHLERDGHS

SEQ ID NO: 17098 - protein, 15 aa, synthetic construct
RALLPAGECARRQRR

SEQ ID NO: 17099 - protein, 15 aa, synthetic construct
RALPAGPALHRAAPG

SEQ ID NO: 17100 - protein, 15 aa, synthetic construct
RALPALPRHGLHALA

SEQ ID NO: 17101 - protein, 15 aa, synthetic construct
RALPALQSELRPHGQ

SEQ ID NO: 17102 - protein, 15 aa, synthetic construct
RALPGQRRGGGRAGP

SEQ ID NO: 17103 - protein, 15 aa, synthetic construct
RALRAVRGQEHDPAP

SEQ ID NO: 17104 - protein, 15 aa, synthetic construct
RALRRRHRHHERPDA

SEQ ID NO: 17105 - protein, 15 aa, synthetic construct
RALSRSQDSVGNQTM

SEQ ID NO: 17106 - protein, 15 aa, synthetic construct
RALSRTRSTRPPPAS

SEQ ID NO: 17107 - protein, 15 aa, synthetic construct
RALWPSSAHSAGELA

SEQ ID NO: 17108 - protein, 15 aa, synthetic construct
RAPAPGPARGPRWGQ

SEQ ID NO: 17109 - protein, 15 aa, synthetic construct
RAPASGKYRRRGGRG

SEQ ID NO: 17110 - protein, 15 aa, synthetic construct
RAPDGRGPRGSPERP

SEQ ID NO: 17111 - protein, 15 aa, synthetic construct
RAPDPRRAPPSRPPC

SEQ ID NO: 17112 - protein, 15 aa, synthetic construct
RAPEDEGKQAGRREL

SEQ ID NO: 17113 - protein, 15 aa, synthetic construct
RAPGAGAPTHLRPAP

SEQ ID NO: 17114 - protein, 15 aa, synthetic construct
RAPGAPSHPLPSGAR

SEQ ID NO: 17115 - protein, 15 aa, synthetic construct
RAPGGPPGGGGSGPQ

SEQ ID NO: 17116 - protein, 15 aa, synthetic construct
RAPGRSRRPRQQSRV

SEQ ID NO: 17117 - protein, 15 aa, synthetic construct
RAPLHAPHLRALPPP

SEQ ID NO: 17118 - protein, 15 aa, synthetic construct
RAPLPRTARLQPAAG

SEQ ID NO: 17119 - protein, 15 aa, synthetic construct
RAPLRQQSAQGLPRP

SEQ ID NO: 17120 - protein, 15 aa, synthetic construct
RAPRAVAVAGAVGLS

SEQ ID NO: 17121 - protein, 15 aa, synthetic construct
RAPRGQPGHPGAPRG

SEQ ID NO: 17122 - protein, 15 aa, synthetic construct
RAPRLRAPAGPRPPP

SEQ ID NO: 17123 - protein, 15 aa, synthetic construct
RAPSGTGGCLWPEAD

SEQ ID NO: 17124 - protein, 15 aa, synthetic construct
RAQEGPVGAPLVCPQ

SEQ ID NO: 17125 - protein, 15 aa, synthetic construct
RAQGAPLGPGDCGAP

SEQ ID NO: 17126 - protein, 15 aa, synthetic construct
RAQQWWPDQARGLGA

SEQ ID NO: 17127 - protein, 15 aa, synthetic construct
RARAGGGPRPERAGP

SEQ ID NO: 17128 - protein, 15 aa, synthetic construct
RARARARRPAALRAR

SEQ ID NO: 17129 - protein, 15 aa, synthetic construct
RARARRAAAGSSAAG

SEQ ID NO: 17130 - protein, 15 aa, synthetic construct
RARGAEALLPGPQGQ

SEQ ID NO: 17131 - protein, 15 aa, synthetic construct
RARGPPRSAGRRSPG

SEQ ID NO: 17132 - protein, 15 aa, synthetic construct
RARGQGQPQRPRDTA

SEQ ID NO: 17133 - protein, 15 aa, synthetic construct
RARGRRAGGRDKPPA

SEQ ID NO: 17134 - protein, 15 aa, synthetic construct
RARGRSCCCCCCWAP

SEQ ID NO: 17135 - protein, 15 aa, synthetic construct
RARGVGQALGGDLGS

SEQ ID NO: 17136 - protein, 15 aa, synthetic construct
RARLLRALPGPRDLP

SEQ ID NO: 17137 - protein, 15 aa, synthetic construct
RARPADAHQLLHREP

SEQ ID NO: 17138 - protein, 15 aa, synthetic construct
RARPGPDPRPGPARA

SEQ ID NO: 17139 - protein, 15 aa, synthetic construct
RARPRAARTASAGAA

SEQ ID NO: 17140 - protein, 15 aa, synthetic construct
RARPRFLRRRLPPRR

SEQ ID NO: 17141 - protein, 15 aa, synthetic construct
RARPVQQHPRPGGRG

SEQ ID NO: 17142 - protein, 15 aa, synthetic construct
RARQPQTQPGGPGDP

SEQ ID NO: 17143 - protein, 15 aa, synthetic construct
RARRAALAGPTRSGC

SEQ ID NO: 17144 - protein, 15 aa, synthetic construct
RARRGRGQRQPSPAA

SEQ ID NO: 17145 - protein, 15 aa, synthetic construct
RARRRGRPRSPGRVR

SEQ ID NO: 17146 - protein, 15 aa, synthetic construct
RARRSSAPARPVPGR

SEQ ID NO: 17147 - protein, 15 aa, synthetic construct
RARTRGRRGPAQREP

SEQ ID NO: 17148 - protein, 15 aa, synthetic construct
RARVPAPQARSLRPA

SEQ ID NO: 17149 - protein, 15 aa, synthetic construct
RARVPRLPPARAAGQ

SEQ ID NO: 17150 - protein, 15 aa, synthetic construct
RASGDDHPEQLATPG

SEQ ID NO: 17151 - protein, 15 aa, synthetic construct
RASPSRGPPGPWRPP

SEQ ID NO: 17152 - protein, 15 aa, synthetic construct
RASRGRQPGVSLPGG

SEQ ID NO: 17153 - protein, 15 aa, synthetic construct
RASRRARRRPPCPGP

SEQ ID NO: 17154 - protein, 15 aa, synthetic construct
RATALPAPGPGNAAA

SEQ ID NO: 17155 - protein, 15 aa, synthetic construct
RATAPGSAGDHGLPG

SEQ ID NO: 17156 - protein, 15 aa, synthetic construct
RATGSRPSPQSSQPP

SEQ ID NO: 17157 - protein, 15 aa, synthetic construct
RATPRPPTAVWAPPA

SEQ ID NO: 17158 - protein, 15 aa, synthetic construct
RATRARATTGRWTPR

SEQ ID NO: 17159 - protein, 15 aa, synthetic construct
RAVAAAWDSGHSCVH

SEQ ID NO: 17160 - protein, 15 aa, synthetic construct
RAVFGRWSERPVGEG

SEQ ID NO: 17161 - protein, 15 aa, synthetic construct
RAVHLDVSRGPASQP

SEQ ID NO: 17162 - protein, 15 aa, synthetic construct
RAVLHRANLASSQAA

SEQ ID NO: 17163 - protein, 15 aa, synthetic construct
RAVPDGLIGPRPWLG

SEQ ID NO: 17164 - protein, 15 aa, synthetic construct
RAVPERPGGGDPSAG

SEQ ID NO: 17165 - protein, 15 aa, synthetic construct
RAVPSRRPAHPRAGV

SEQ ID NO: 17166 - protein, 15 aa, synthetic construct
RAVRARVWHPRSREP

SEQ ID NO: 17167 - protein, 15 aa, synthetic construct
RAVRVHAGPVHQERP

SEQ ID NO: 17168 - protein, 15 aa, synthetic construct
RAVVPAAGPEAFLQQ

SEQ ID NO: 17169 - protein, 15 aa, synthetic construct
RAWCPAAATELRGDS

SEQ ID NO: 17170 - protein, 15 aa, synthetic construct
RAYPLTRPHPQQWDY

SEQ ID NO: 17171 - protein, 15 aa, synthetic construct
RCAAEEADVRSLVPC

SEQ ID NO: 17172 - protein, 15 aa, synthetic construct
RCGSGWAPAASGTSV

SEQ ID NO: 17173 - protein, 15 aa, synthetic construct
RCPRRLLFPGPHPPG

SEQ ID NO: 17174 - protein, 15 aa, synthetic construct
RDAGGGRRAPGGGAA

SEQ ID NO: 17175 - protein, 15 aa, synthetic construct
RDATKWPATCGRSSR

SEQ ID NO: 17176 - protein, 15 aa, synthetic construct
RDGGRAGHEGPQEGQ

SEQ ID NO: 17177 - protein, 15 aa, synthetic construct
RDGKGRRRGFWCGRS

SEQ ID NO: 17178 - protein, 15 aa, synthetic construct
RDGLPESQTPVPVQG

SEQ ID NO: 17179 - protein, 15 aa, synthetic construct
RDGPQGQERGSRHQL

SEQ ID NO: 17180 - protein, 15 aa, synthetic construct
RDHHRPERAHTDRSE

SEQ ID NO: 17181 - protein, 15 aa, synthetic construct
RDLGSSSQLILCSLP

SEQ ID NO: 17182 - protein, 15 aa, synthetic construct
RDLGTAFYSSNSADS

SEQ ID NO: 17183 - protein, 15 aa, synthetic construct
RDLHGNPRGARHPPV

SEQ ID NO: 17184 - protein, 15 aa, synthetic construct
RDLPGARRALLHVVH

SEQ ID NO: 17185 - protein, 15 aa, synthetic construct
RDLRRGGPGARLPAP

SEQ ID NO: 17186 - protein, 15 aa, synthetic construct
RDNGGAQPEQHLPLG

SEQ ID NO: 17187 - protein, 15 aa, synthetic construct
RDPGAGGQRGSGQQE

SEQ ID NO: 17188 - protein, 15 aa, synthetic construct
RDPGAGWQRGPRQQE

SEQ ID NO: 17189 - protein, 15 aa, synthetic construct
RDPGGARAAWAAPAP

SEQ ID NO: 17190 - protein, 15 aa, synthetic construct
RDPGGRAVHHLRGPG

SEQ ID NO: 17191 - protein, 15 aa, synthetic construct
RDPKAQPVSAAATAG

SEQ ID NO: 17192 - protein, 15 aa, synthetic construct
RDPPSDLPAHSASAA

SEQ ID NO: 17193 - protein, 15 aa, synthetic construct
RDPSKDSSTTLWSTW

SEQ ID NO: 17194 - protein, 15 aa, synthetic construct
RDRAEAAAEAAAREG

SEQ ID NO: 17195 - protein, 15 aa, synthetic construct
RDRGGGREEAGHWRH

SEQ ID NO: 17196 - protein, 15 aa, synthetic construct
RDRGRGGRRGDWRKR

SEQ ID NO: 17197 - protein, 15 aa, synthetic construct
RDRRPRKGCGSGRHV

SEQ ID NO: 17198 - protein, 15 aa, synthetic construct
RDSGCGERSWGVLAA

SEQ ID NO: 17199 - protein, 15 aa, synthetic construct
RDSGEVPAAVRPLES

SEQ ID NO: 17200 - protein, 15 aa, synthetic construct
RDSGSRNPAPAAARA

SEQ ID NO: 17201 - protein, 15 aa, synthetic construct
RDSHLRAGGPAQQSS

SEQ ID NO: 17202 - protein, 15 aa, synthetic construct
RDSNAQRAVRGRRLR

SEQ ID NO: 17203 - protein, 15 aa, synthetic construct
RDYGLPLLWGNLADG

SEQ ID NO: 17204 - protein, 15 aa, synthetic construct
REAAAGAHHPAGVPG

SEQ ID NO: 17205 - protein, 15 aa, synthetic construct
REAERQGPLPEDRRG

SEQ ID NO: 17206 - protein, 15 aa, synthetic construct
REAGGEGADQVPQQQ

SEQ ID NO: 17207 - protein, 15 aa, synthetic construct
REAPACHWAGWQLFA

SEQ ID NO: 17208 - protein, 15 aa, synthetic construct
REATGCWGAPDFAGF

SEQ ID NO: 17209 - protein, 15 aa, synthetic construct
REAVPGTGPGGEAEA

SEQ ID NO: 17210 - protein, 15 aa, synthetic construct
REDRGAVCFQGYPAA

SEQ ID NO: 17211 - protein, 15 aa, synthetic construct
REDSSERPGQRPRIG

SEQ ID NO: 17212 - protein, 15 aa, synthetic construct
REELREPLAAGPSAR

SEQ ID NO: 17213 - protein, 15 aa, synthetic construct
REEPGSGVRGRAQGL

SEQ ID NO: 17214 - protein, 15 aa, synthetic construct
REERGRGETLLKAGA

SEQ ID NO: 17215 - protein, 15 aa, synthetic construct
REESATTLRSAGQET

SEQ ID NO: 17216 - protein, 15 aa, synthetic construct
REEVHGGRYSNRCGA

SEQ ID NO: 17217 - protein, 15 aa, synthetic construct
REFQSLSGYEERSPA

SEQ ID NO: 17218 - protein, 15 aa, synthetic construct
REGASSGRGPGAQRC

SEQ ID NO: 17219 - protein, 15 aa, synthetic construct
REGEALLQQAAVSER

SEQ ID NO: 17220 - protein, 15 aa, synthetic construct
REGGQEPGQETQEDG

SEQ ID NO: 17221 - protein, 15 aa, synthetic construct
REGHSPSAAARSDWG

SEQ ID NO: 17222 - protein, 15 aa, synthetic construct
REGRAGPPRPAGPAR

SEQ ID NO: 17223 - protein, 15 aa, synthetic construct
REGRPAPPRPGSRVG

SEQ ID NO: 17224 - protein, 15 aa, synthetic construct
REKKNSKKQLNTLMK

SEQ ID NO: 17225 - protein, 15 aa, synthetic construct
RELDPGDRIHLAHLH

SEQ ID NO: 17226 - protein, 15 aa, synthetic construct
RELSAECNFARPRGT

SEQ ID NO: 17227 - protein, 15 aa, synthetic construct
REPGAGRETEATFPG

SEQ ID NO: 17228 - protein, 15 aa, synthetic construct
REPREVPVRGEEPLV

SEQ ID NO: 17229 - protein, 15 aa, synthetic construct
REPRPEGVGVAAAET

SEQ ID NO: 17230 - protein, 15 aa, synthetic construct
REPSGGSGAQERLAE

SEQ ID NO: 17231 - protein, 15 aa, synthetic construct
REQREVEEEEREQEP

SEQ ID NO: 17232 - protein, 15 aa, synthetic construct
RERAAPGPRGEPRGA

SEQ ID NO: 17233 - protein, 15 aa, synthetic construct
REREAMEGPHGIHPA

SEQ ID NO: 17234 - protein, 15 aa, synthetic construct
RERGDPGAAGPPAGG

SEQ ID NO: 17235 - protein, 15 aa, synthetic construct
RERGLPGDQPAAAPL

SEQ ID NO: 17236 - protein, 15 aa, synthetic construct
RERRRGRRRPAGRAH

SEQ ID NO: 17237 - protein, 15 aa, synthetic construct
REVPHPQGLSPGSAD

SEQ ID NO: 17238 - protein, 15 aa, synthetic construct
REVQGEDARGSRGQD

SEQ ID NO: 17239 - protein, 15 aa, synthetic construct
RFEQQQQPRQPSPWR

SEQ ID NO: 17240 - protein, 15 aa, synthetic construct
RFHPQDPAHSRADWH

SEQ ID NO: 17241 - protein, 15 aa, synthetic construct
RFLRGGETGSRGRRR

SEQ ID NO: 17242 - protein, 15 aa, synthetic construct
RFTAGQPKPERCGPQ

SEQ ID NO: 17243 - protein, 15 aa, synthetic construct
RGAAAARGARRSGGR

SEQ ID NO: 17244 - protein, 15 aa, synthetic construct
RGAAAGGGPAAGRGA

SEQ ID NO: 17245 - protein, 15 aa, synthetic construct
RGAAAGHPELPAERR

SEQ ID NO: 17246 - protein, 15 aa, synthetic construct
RGAAALRPLRTPGLP

SEQ ID NO: 17247 - protein, 15 aa, synthetic construct
RGAADAGLRAAREDT

SEQ ID NO: 17248 - protein, 15 aa, synthetic construct
RGAAEPAHPGQRARA

SEQ ID NO: 17249 - protein, 15 aa, synthetic construct
RGAALGRADTRGAPP

SEQ ID NO: 17250 - protein, 15 aa, synthetic construct
RGAALQRAAPQQLVT

SEQ ID NO: 17251 - protein, 15 aa, synthetic construct
RGAALWLLRQRLLPV

SEQ ID NO: 17252 - protein, 15 aa, synthetic construct
RGAEEEAPAPGARAR

SEQ ID NO: 17253 - protein, 15 aa, synthetic construct
RGAEGPGGSGGAALP

SEQ ID NO: 17254 - protein, 15 aa, synthetic construct
RGAEPPGHAGERGAR

SEQ ID NO: 17255 - protein, 15 aa, synthetic construct
RGAGGLPAPRALQVP

SEQ ID NO: 17256 - protein, 15 aa, synthetic construct
RGAGPGAGRRPRAAR

SEQ ID NO: 17257 - protein, 15 aa, synthetic construct
RGAGRAGGGAGGEER

SEQ ID NO: 17258 - protein, 15 aa, synthetic construct
RGAGSPAAVLPRADA

SEQ ID NO: 17259 - protein, 15 aa, synthetic construct
RGAKRVPGSGRVGVQ

SEQ ID NO: 17260 - protein, 15 aa, synthetic construct
RGAPGGGKPLRRRRA

SEQ ID NO: 17261 - protein, 15 aa, synthetic construct
RGAPGPGLRAEPAAQ

SEQ ID NO: 17262 - protein, 15 aa, synthetic construct
RGAPGRSERGRFPRH

SEQ ID NO: 17263 - protein, 15 aa, synthetic construct
RGAPGYWDLQPAWGE

SEQ ID NO: 17264 - protein, 15 aa, synthetic construct
RGARGDPRPAAPLPL

SEQ ID NO: 17265 - protein, 15 aa, synthetic construct
RGARGRRLRRRRRRQ

SEQ ID NO: 17266 - protein, 15 aa, synthetic construct
RGATAGEKNTAVGMA

SEQ ID NO: 17267 - protein, 15 aa, synthetic construct
RGATGAASAVRGDHR

SEQ ID NO: 17268 - protein, 15 aa, synthetic construct
RGAVREVQLPGLPAR

SEQ ID NO: 17269 - protein, 15 aa, synthetic construct
RGAVRGGEEGGAGYV

SEQ ID NO: 17270 - protein, 15 aa, synthetic construct
RGAWARGGGPGGAED

SEQ ID NO: 17271 - protein, 15 aa, synthetic construct
RGCPGLEERAQGESG

SEQ ID NO: 17272 - protein, 15 aa, synthetic construct
RGCRWGCCCGRGWPW

SEQ ID NO: 17273 - protein, 15 aa, synthetic construct
RGDGGSRSWSRSSRR

SEQ ID NO: 17274 - protein, 15 aa, synthetic construct
RGDPLLPAGRGGHGE

SEQ ID NO: 17275 - protein, 15 aa, synthetic construct
RGEGGRGALAALDHR

SEQ ID NO: 17276 - protein, 15 aa, synthetic construct
RGEGRGAGEDAGRQE

SEQ ID NO: 17277 - protein, 15 aa, synthetic construct
RGEPRPFPVPSALGA

SEQ ID NO: 17278 - protein, 15 aa, synthetic construct
RGERQRRWRGQPAAP

SEQ ID NO: 17279 - protein, 15 aa, synthetic construct
RGFPRAQPAVSAASA

SEQ ID NO: 17280 - protein, 15 aa, synthetic construct
RGGAGGGPVCAGAQA

SEQ ID NO: 17281 - protein, 15 aa, synthetic construct
RGGAGQAGQSGGGAG

SEQ ID NO: 17282 - protein, 15 aa, synthetic construct
RGGAGRTRAAGAGGA

SEQ ID NO: 17283 - protein, 15 aa, synthetic construct
RGGAGTQLLGHREPR

SEQ ID NO: 17284 - protein, 15 aa, synthetic construct
RGGAQGDVAAGSGRV

SEQ ID NO: 17285 - protein, 15 aa, synthetic construct
RGGASRAARVPGQVR

SEQ ID NO: 17286 - protein, 15 aa, synthetic construct
RGGASRCPEAPTAGA

SEQ ID NO: 17287 - protein, 15 aa, synthetic construct
RGGDQGGNGGSWAHR

SEQ ID NO: 17288 - protein, 15 aa, synthetic construct
RGGEAGDEPASSSRP

SEQ ID NO: 17289 - protein, 15 aa, synthetic construct
RGGERGARSRQRRGP

SEQ ID NO: 17290 - protein, 15 aa, synthetic construct
RGGGAGPEAGVGAGR

SEQ ID NO: 17291 - protein, 15 aa, synthetic construct
RGGGALLGAQERRPG

SEQ ID NO: 17292 - protein, 15 aa, synthetic construct
RGGGALLGAQERRTG

SEQ ID NO: 17293 - protein, 15 aa, synthetic construct
RGGGGRRLRRAAQPG

SEQ ID NO: 17294 - protein, 15 aa, synthetic construct
RGGHGPAPFAGAPPG

SEQ ID NO: 17295 - protein, 15 aa, synthetic construct
RGGKRPPATAGPEAG

SEQ ID NO: 17296 - protein, 15 aa, synthetic construct
RGGLHGPPRLRALPA

SEQ ID NO: 17297 - protein, 15 aa, synthetic construct
RGGPGGAGQPGKVAQ

SEQ ID NO: 17298 - protein, 15 aa, synthetic construct
RGGPPGGSTGDPPAQ

SEQ ID NO: 17299 - protein, 15 aa, synthetic construct
RGGRARGRLAAQSHR

SEQ ID NO: 17300 - protein, 15 aa, synthetic construct
RGGRGGRTNLAARHG

SEQ ID NO: 17301 - protein, 15 aa, synthetic construct
RGGRRAPVLPQPRAR

SEQ ID NO: 17302 - protein, 15 aa, synthetic construct
RGGRRSRRGKELGRR

SEQ ID NO: 17303 - protein, 15 aa, synthetic construct
RGGTRRAGGGPGEGA

SEQ ID NO: 17304 - protein, 15 aa, synthetic construct
RGHCQPESPDSPQPA

SEQ ID NO: 17305 - protein, 15 aa, synthetic construct
RGHGGRDHPEGHRDP

SEQ ID NO: 17306 - protein, 15 aa, synthetic construct
RGHPRPDPVQAAARQ

SEQ ID NO: 17307 - protein, 15 aa, synthetic construct
RGHRQPESPDSPQPA

SEQ ID NO: 17308 - protein, 15 aa, synthetic construct
RGKASAAASPSPAGG

SEQ ID NO: 17309 - protein, 15 aa, synthetic construct
RGKKCPEGRGCRPAT

SEQ ID NO: 17310 - protein, 15 aa, synthetic construct
RGLALDVGAEPCGVG

SEQ ID NO: 17311 - protein, 15 aa, synthetic construct
RGLCPRLHQETRGGG

SEQ ID NO: 17312 - protein, 15 aa, synthetic construct
RGLGDAPTEQPLAHS

SEQ ID NO: 17313 - protein, 15 aa, synthetic construct
RGLLCAARKEPALHL

SEQ ID NO: 17314 - protein, 15 aa, synthetic construct
RGLPLQPPEDPGLRE

SEQ ID NO: 17315 - protein, 15 aa, synthetic construct
RGLPQRRRQGAGGGR

SEQ ID NO: 17316 - protein, 15 aa, synthetic construct
RGLQAPGTTRSGLRP

SEQ ID NO: 17317 - protein, 15 aa, synthetic construct
RGLRADPGAAARARA

SEQ ID NO: 17318 - protein, 15 aa, synthetic construct
RGLRAPGPAAAPTLA

SEQ ID NO: 17319 - protein, 15 aa, synthetic construct
RGLRGARTGVRGGAG

SEQ ID NO: 17320 - protein, 15 aa, synthetic construct
RGLRGLRAQSSDELS

SEQ ID NO: 17321 - protein, 15 aa, synthetic construct
RGLRGQERPQGGAPD

SEQ ID NO: 17322 - protein, 15 aa, synthetic construct
RGLRLQERLGGAAPL

SEQ ID NO: 17323 - protein, 15 aa, synthetic construct
RGLVDRAAEPAGGHL

SEQ ID NO: 17324 - protein, 15 aa, synthetic construct
RGLWDSAPRGRGIQD

SEQ ID NO: 17325 - protein, 15 aa, synthetic construct
RGNGSGDPRVAAPDH

SEQ ID NO: 17326 - protein, 15 aa, synthetic construct
RGNQRPVPAGAPAAA

SEQ ID NO: 17327 - protein, 15 aa, synthetic construct
RGPADQPDGVERLGE

SEQ ID NO: 17328 - protein, 15 aa, synthetic construct
RGPAGRRRRGPGVPG

SEQ ID NO: 17329 - protein, 15 aa, synthetic construct
RGPAKAGQGRGAQAP

SEQ ID NO: 17330 - protein, 15 aa, synthetic construct
RGPARRAMPRAAGGG

SEQ ID NO: 17331 - protein, 15 aa, synthetic construct
RGPGAERRPLGSLGL

SEQ ID NO: 17332 - protein, 15 aa, synthetic construct
RGPGARGAAAVPAGR

SEQ ID NO: 17333 - protein, 15 aa, synthetic construct
RGPGARRSGVDQGDA

SEQ ID NO: 17334 - protein, 15 aa, synthetic construct
RGPGESSQAAAGRER

SEQ ID NO: 17335 - protein, 15 aa, synthetic construct
RGPGGAAGGGRALGP

SEQ ID NO: 17336 - protein, 15 aa, synthetic construct
RGPGRSRLPAAARTG

SEQ ID NO: 17337 - protein, 15 aa, synthetic construct
RGPHVAGADVAFLAT

SEQ ID NO: 17338 - protein, 15 aa, synthetic construct
RGPLALRWARARVPR

SEQ ID NO: 17339 - protein, 15 aa, synthetic construct
RGPLGPGPFLSLQRG

SEQ ID NO: 17340 - protein, 15 aa, synthetic construct
RGPPRGPSAPPVATH

SEQ ID NO: 17341 - protein, 15 aa, synthetic construct
RGPRQRGRTRPRAGR

SEQ ID NO: 17342 - protein, 15 aa, synthetic construct
RGPRRRGPPGRGQRL

SEQ ID NO: 17343 - protein, 15 aa, synthetic construct
RGPRTASAAAAGAPH

SEQ ID NO: 17344 - protein, 15 aa, synthetic construct
RGPTRRRSRRGAPGT

SEQ ID NO: 17345 - protein, 15 aa, synthetic construct
RGPVRGRARCPRRSR

SEQ ID NO: 17346 - protein, 15 aa, synthetic construct
RGPWGGGAPPTRPAL

SEQ ID NO: 17347 - protein, 15 aa, synthetic construct
RGQDSPQDAQPQGRC

SEQ ID NO: 17348 - protein, 15 aa, synthetic construct
RGQGGGGGGLGGVVP

SEQ ID NO: 17349 - protein, 15 aa, synthetic construct
RGQGRRDPAREVSGR

SEQ ID NO: 17350 - protein, 15 aa, synthetic construct
RGQRRAAGTAGAAGP

SEQ ID NO: 17351 - protein, 15 aa, synthetic construct
RGRAGARGPAEGPQG

SEQ ID NO: 17352 - protein, 15 aa, synthetic construct
RGRAPSLAPESAAPA

SEQ ID NO: 17353 - protein, 15 aa, synthetic construct
RGRDVGAGVRPGRLH

SEQ ID NO: 17354 - protein, 15 aa, synthetic construct
RGREAALRGGGQAAP

SEQ ID NO: 17355 - protein, 15 aa, synthetic construct
RGREGATRSAASGPG

SEQ ID NO: 17356 - protein, 15 aa, synthetic construct
RGRERGKETRTEAPA

SEQ ID NO: 17357 - protein, 15 aa, synthetic construct
RGRGAAWLPEHGRGG

SEQ ID NO: 17358 - protein, 15 aa, synthetic construct
RGRGGASIREGPLPA

SEQ ID NO: 17359 - protein, 15 aa, synthetic construct
RGRGGRRGGGRGGRG

SEQ ID NO: 17360 - protein, 15 aa, synthetic construct
RGRGPRGAPVLPAGE

SEQ ID NO: 17361 - protein, 15 aa, synthetic construct
RGRGRGRRRGPGGGG

SEQ ID NO: 17362 - protein, 15 aa, synthetic construct
RGRGRLGPGPGASAG

SEQ ID NO: 17363 - protein, 15 aa, synthetic construct
RGRGSRRRRPGRPRP

SEQ ID NO: 17364 - protein, 15 aa, synthetic construct
RGRKKRRSRWSRRGR

SEQ ID NO: 17365 - protein, 15 aa, synthetic construct
RGRKRRRTASSYCSS

SEQ ID NO: 17366 - protein, 15 aa, synthetic construct
RGRKRRTTASSCCSS

SEQ ID NO: 17367 - protein, 15 aa, synthetic construct
RGRPNAQAAAARAPR

SEQ ID NO: 17368 - protein, 15 aa, synthetic construct
RGRRCPPSAGSRSAR

SEQ ID NO: 17369 - protein, 15 aa, synthetic construct
RGRRGPLGGPGGGRR

SEQ ID NO: 17370 - protein, 15 aa, synthetic construct
RGRRGPPAPRRSLPG

SEQ ID NO: 17371 - protein, 15 aa, synthetic construct
RGRRREPQRQQAAGA

SEQ ID NO: 17372 - protein, 15 aa, synthetic construct
RGRRRGAARLRSGRR

SEQ ID NO: 17373 - protein, 15 aa, synthetic construct
RGRRRLCRPRSPGPR

SEQ ID NO: 17374 - protein, 15 aa, synthetic construct
RGRRRRGAPGPRGRP

SEQ ID NO: 17375 - protein, 15 aa, synthetic construct
RGRRRRQRRAGVPGP

SEQ ID NO: 17376 - protein, 15 aa, synthetic construct
RGRRRRRPGSAAAAA

SEQ ID NO: 17377 - protein, 15 aa, synthetic construct
RGRSETGRGAPGAGW

SEQ ID NO: 17378 - protein, 15 aa, synthetic construct
RGRSPAPGTDTERWP

SEQ ID NO: 17379 - protein, 15 aa, synthetic construct
RGRVARRRRRRAGAA

SEQ ID NO: 17380 - protein, 15 aa, synthetic construct
RGRVRRAAAALAATP

SEQ ID NO: 17381 - protein, 15 aa, synthetic construct
RGSAAPTEKGPEPWS

SEQ ID NO: 17382 - protein, 15 aa, synthetic construct
RGSADGGAARAETET

SEQ ID NO: 17383 - protein, 15 aa, synthetic construct
RGSGGGGGGTRRGGR

SEQ ID NO: 17384 - protein, 15 aa, synthetic construct
RGSGRSGGVAGQEKR

SEQ ID NO: 17385 - protein, 15 aa, synthetic construct
RGSPASGPLLAERAA

SEQ ID NO: 17386 - protein, 15 aa, synthetic construct
RGSPGPTRGEAPQAA

SEQ ID NO: 17387 - protein, 15 aa, synthetic construct
RGSRPRAPPGQRTLR

SEQ ID NO: 17388 - protein, 15 aa, synthetic construct
RGTCELMAVATAQRR

SEQ ID NO: 17389 - protein, 15 aa, synthetic construct
RGTDEACREALRNRL

SEQ ID NO: 17390 - protein, 15 aa, synthetic construct
RGTETGAIAETPGLR

SEQ ID NO: 17391 - protein, 15 aa, synthetic construct
RGTWARGPPAQRDTQ

SEQ ID NO: 17392 - protein, 15 aa, synthetic construct
RGVGVGAEGGGGRGP

SEQ ID NO: 17393 - protein, 15 aa, synthetic construct
RGVPHGRRVCEPGLA

SEQ ID NO: 17394 - protein, 15 aa, synthetic construct
RGVPPAQDSATARAP

SEQ ID NO: 17395 - protein, 15 aa, synthetic construct
RGVPVAHPAGERVPL

SEQ ID NO: 17396 - protein, 15 aa, synthetic construct
RGVQLAAEAAAARAT

SEQ ID NO: 17397 - protein, 15 aa, synthetic construct
RGVRMAVPLLRRMEG

SEQ ID NO: 17398 - protein, 15 aa, synthetic construct
RGVVARGGRRRGAGA

SEQ ID NO: 17399 - protein, 15 aa, synthetic construct
RGWEPSWGCSWWACG

SEQ ID NO: 17400 - protein, 15 aa, synthetic construct
RGWHGVPELGPRGSG

SEQ ID NO: 17401 - protein, 15 aa, synthetic construct
RGWRGLRAPRYRDPG

SEQ ID NO: 17402 - protein, 15 aa, synthetic construct
RHCLGGSRPYSSKPR

SEQ ID NO: 17403 - protein, 15 aa, synthetic construct
RHEARPGPRLLHAAL

SEQ ID NO: 17404 - protein, 15 aa, synthetic construct
RHGEAGHPRPREGPV

SEQ ID NO: 17405 - protein, 15 aa, synthetic construct
RHGGAGHPHPREGPV

SEQ ID NO: 17406 - protein, 15 aa, synthetic construct
RHGRRPSVRQSQPQD

SEQ ID NO: 17407 - protein, 15 aa, synthetic construct
RHGSRTSVRESEPQG

SEQ ID NO: 17408 - protein, 15 aa, synthetic construct
RHPAPDVRAPAPAVA

SEQ ID NO: 17409 - protein, 15 aa, synthetic construct
RHPAPPAALLPHRLP

SEQ ID NO: 17410 - protein, 15 aa, synthetic construct
RHPPAHPDLPVAANQ

SEQ ID NO: 17411 - protein, 15 aa, synthetic construct
RHPVGHCTSASLRDL

SEQ ID NO: 17412 - protein, 15 aa, synthetic construct
RHQEGDGGHRESAEM

SEQ ID NO: 17413 - protein, 15 aa, synthetic construct
RHQPGADSGRGPVLL

SEQ ID NO: 17414 - protein, 15 aa, synthetic construct
RHRGADDSSRRARPA

SEQ ID NO: 17415 - protein, 15 aa, synthetic construct
RHRPARGGAAAHRQL

SEQ ID NO: 17416 - protein, 15 aa, synthetic construct
RHRQGPGAGAPGAGG

SEQ ID NO: 17417 - protein, 15 aa, synthetic construct
RHSLWVRDPGGGGPR

SEQ ID NO: 17418 - protein, 15 aa, synthetic construct
RHSPGGARRRRAAPA

SEQ ID NO: 17419 - protein, 15 aa, synthetic construct
RIAVRRGRRLRPARR

SEQ ID NO: 17420 - protein, 15 aa, synthetic construct
RIPREPHLSFADETG

SEQ ID NO: 17421 - protein, 15 aa, synthetic construct
RIRPAESRGHRLLCG

SEQ ID NO: 17422 - protein, 15 aa, synthetic construct
RISPLRTFRQSRSTR

SEQ ID NO: 17423 - protein, 15 aa, synthetic construct
RKAPRVALSRPPGPQ

SEQ ID NO: 17424 - protein, 15 aa, synthetic construct
RKCAPRDYWYLLAPR

SEQ ID NO: 17425 - protein, 15 aa, synthetic construct
RKCDVFTCPKASTRT

SEQ ID NO: 17426 - protein, 15 aa, synthetic construct
RKCLGPGGGRTRVAA

SEQ ID NO: 17427 - protein, 15 aa, synthetic construct
RKEGSGPALATLLLP

SEQ ID NO: 17428 - protein, 15 aa, synthetic construct
RKGERRPRRLRRSPN

SEQ ID NO: 17429 - protein, 15 aa, synthetic construct
RKQWPIARLHGHAFA

SEQ ID NO: 17430 - protein, 15 aa, synthetic construct
RKRPSRRAPPGAGTV

SEQ ID NO: 17431 - protein, 15 aa, synthetic construct
RKSPLWMPRAVERPA

SEQ ID NO: 17432 - protein, 15 aa, synthetic construct
RKTPRRLPSRPPLRS

SEQ ID NO: 17433 - protein, 15 aa, synthetic construct
RKVPGGKTNPARRVP

SEQ ID NO: 17434 - protein, 15 aa, synthetic construct
RLAGGAPRAGPVQLS

SEQ ID NO: 17435 - protein, 15 aa, synthetic construct
RLAGSGRGAESGRPL

SEQ ID NO: 17436 - protein, 15 aa, synthetic construct
RLAPPRGRPGDARGG

SEQ ID NO: 17437 - protein, 15 aa, synthetic construct
RLARPAQRPTPALAG

SEQ ID NO: 17438 - protein, 15 aa, synthetic construct
RLDGKAETRGLGPQT

SEQ ID NO: 17439 - protein, 15 aa, synthetic construct
RLFPSSKTLALSGHS

SEQ ID NO: 17440 - protein, 15 aa, synthetic construct
RLGARPAEPLPWSLR

SEQ ID NO: 17441 - protein, 15 aa, synthetic construct
RLGASVSPSANSGPW

SEQ ID NO: 17442 - protein, 15 aa, synthetic construct
RLGLLVQVCSFLWAE

SEQ ID NO: 17443 - protein, 15 aa, synthetic construct
RLGRCPGGGAGEGGP

SEQ ID NO: 17444 - protein, 15 aa, synthetic construct
RLHGHQVVHRGALRG

SEQ ID NO: 17445 - protein, 15 aa, synthetic construct
RLHPPAQTFVEPRQG

SEQ ID NO: 17446 - protein, 15 aa, synthetic construct
RLHPPASSLQAARTT

SEQ ID NO: 17447 - protein, 15 aa, synthetic construct
RLLEPRPGGAGAPGL

SEQ ID NO: 17448 - protein, 15 aa, synthetic construct
RLLLQAQQLQAHPCQ

SEQ ID NO: 17449 - protein, 15 aa, synthetic construct
RLLPAHLHPAVHGHR

SEQ ID NO: 17450 - protein, 15 aa, synthetic construct
RLLSRRRSLRLNRSS

SEQ ID NO: 17451 - protein, 15 aa, synthetic construct
RLNSCPQQERAGMRA

SEQ ID NO: 17452 - protein, 15 aa, synthetic construct
RLPAAPPPPPPPQPP

SEQ ID NO: 17453 - protein, 15 aa, synthetic construct
RLPAAPRRPDGGEHE

SEQ ID NO: 17454 - protein, 15 aa, synthetic construct
RLPADEWRGRAATQV

SEQ ID NO: 17455 - protein, 15 aa, synthetic construct
RLPAEEAREPRAPGR

SEQ ID NO: 17456 - protein, 15 aa, synthetic construct
RLPASPASPVHQQGA

SEQ ID NO: 17457 - protein, 15 aa, synthetic construct
RLPATCSAARAGAPR

SEQ ID NO: 17458 - protein, 15 aa, synthetic construct
RLPGDQPGGGGGVPP

SEQ ID NO: 17459 - protein, 15 aa, synthetic construct
RLPGFGPPRSCLPSA

SEQ ID NO: 17460 - protein, 15 aa, synthetic construct
RLPGIPQPPALRAHG

SEQ ID NO: 17461 - protein, 15 aa, synthetic construct
RLPHEALERHLRVHV

SEQ ID NO: 17462 - protein, 15 aa, synthetic construct
RLPLNQLWSNALAIA

SEQ ID NO: 17463 - protein, 15 aa, synthetic construct
RLPRPRAPRAPRPLP

SEQ ID NO: 17464 - protein, 15 aa, synthetic construct
RLPRPTPAQHAAHGP

SEQ ID NO: 17465 - protein, 15 aa, synthetic construct
RLPSAAGPPRSAHGA

SEQ ID NO: 17466 - protein, 15 aa, synthetic construct
RLPSARGLQPPPRSL

SEQ ID NO: 17467 - protein, 15 aa, synthetic construct
RLPSLLQPPALPAEL

SEQ ID NO: 17468 - protein, 15 aa, synthetic construct
RLPSPQPRSPAAGAT

SEQ ID NO: 17469 - protein, 15 aa, synthetic construct
RLPVEGGFAGVPECA

SEQ ID NO: 17470 - protein, 15 aa, synthetic construct
RLQALPREPGLAGQP

SEQ ID NO: 17471 - protein, 15 aa, synthetic construct
RLQERAQQPARARLQ

SEQ ID NO: 17472 - protein, 15 aa, synthetic construct
RLQPGYPIPGSEGGR

SEQ ID NO: 17473 - protein, 15 aa, synthetic construct
RLQQWHTLPVPDQVP

SEQ ID NO: 17474 - protein, 15 aa, synthetic construct
RLQRGSPGAALVRRA

SEQ ID NO: 17475 - protein, 15 aa, synthetic construct
RLQRPLPVTPRCGLA

SEQ ID NO: 17476 - protein, 15 aa, synthetic construct
RLRARQPEPAPGDVG

SEQ ID NO: 17477 - protein, 15 aa, synthetic construct
RLREAHGEPEAGGYP

SEQ ID NO: 17478 - protein, 15 aa, synthetic construct
RLRGTRHRLRPPERL

SEQ ID NO: 17479 - protein, 15 aa, synthetic construct
RLRHEPGADNGKSGH

SEQ ID NO: 17480 - protein, 15 aa, synthetic construct
RLRMCRRDWVARPGA

SEQ ID NO: 17481 - protein, 15 aa, synthetic construct
RLRPAPAAASARPPP

SEQ ID NO: 17482 - protein, 15 aa, synthetic construct
RLRPARPPGWGQAAA

SEQ ID NO: 17483 - protein, 15 aa, synthetic construct
RLRPRPPPRPPPPGS

SEQ ID NO: 17484 - protein, 15 aa, synthetic construct
RLRPSWRSKRARLRA

SEQ ID NO: 17485 - protein, 15 aa, synthetic construct
RLRRGAAAPGRAAPG

SEQ ID NO: 17486 - protein, 15 aa, synthetic construct
RLRRRGRGRRPGGGR

SEQ ID NO: 17487 - protein, 15 aa, synthetic construct
RLSPAPAPAPPWPGP

SEQ ID NO: 17488 - protein, 15 aa, synthetic construct
RLSPGRGPRAASRPT

SEQ ID NO: 17489 - protein, 15 aa, synthetic construct
RLTARGAAAAAGEAR

SEQ ID NO: 17490 - protein, 15 aa, synthetic construct
RLWPPGAQTAASRRA

SEQ ID NO: 17491 - protein, 15 aa, synthetic construct
RLWPQPDVLHLRLSH

SEQ ID NO: 17492 - protein, 15 aa, synthetic construct
RLYLRGGRRLHAPGA

SEQ ID NO: 17493 - protein, 15 aa, synthetic construct
RMERKTALWEEVKAT

SEQ ID NO: 17494 - protein, 15 aa, synthetic construct
RMGPWTFLSFRKAWR

SEQ ID NO: 17495 - protein, 15 aa, synthetic construct
RMSATGCCGAAPSTG

SEQ ID NO: 17496 - protein, 15 aa, synthetic construct
RNGRGGRPGEHGAAL

SEQ ID NO: 17497 - protein, 15 aa, synthetic construct
RNLTICRPCWSFTRS

SEQ ID NO: 17498 - protein, 15 aa, synthetic construct
RNPCLWLSPGLLGTL

SEQ ID NO: 17499 - protein, 15 aa, synthetic construct
RNPKPRASCSHRRCA

SEQ ID NO: 17500 - protein, 15 aa, synthetic construct
RNPRLRRRQLRRLPA

SEQ ID NO: 17501 - protein, 15 aa, synthetic construct
RNPRPRRPAASSWKA

SEQ ID NO: 17502 - protein, 15 aa, synthetic construct
RNPVGAGATSGARGT

SEQ ID NO: 17503 - protein, 15 aa, synthetic construct
RNQIRRRDGAARLPG

SEQ ID NO: 17504 - protein, 15 aa, synthetic construct
RNSGAEEETPQMPVG

SEQ ID NO: 17505 - protein, 15 aa, synthetic construct
RNSGASCANGPGSGS

SEQ ID NO: 17506 - protein, 15 aa, synthetic construct
RNTKPRAPSGWSSVK

SEQ ID NO: 17507 - protein, 15 aa, synthetic construct
RPAAACAAPAPCRLP

SEQ ID NO: 17508 - protein, 15 aa, synthetic construct
RPAAAPAAAAAAVGA

SEQ ID NO: 17509 - protein, 15 aa, synthetic construct
RPAAAPGPRATGCRP

SEQ ID NO: 17510 - protein, 15 aa, synthetic construct
RPAAGQPAAAGAARA

SEQ ID NO: 17511 - protein, 15 aa, synthetic construct
RPAAQPGSVEPGGGG

SEQ ID NO: 17512 - protein, 15 aa, synthetic construct
RPAARHLRQGGAAED

SEQ ID NO: 17513 - protein, 15 aa, synthetic construct
RPAARLGRAPAAPAP

SEQ ID NO: 17514 - protein, 15 aa, synthetic construct
RPAASTAGAEGGPAP

SEQ ID NO: 17515 - protein, 15 aa, synthetic construct
RPADAASAGLRAQLR

SEQ ID NO: 17516 - protein, 15 aa, synthetic construct
RPAEPPVPGGRSFPG

SEQ ID NO: 17517 - protein, 15 aa, synthetic construct
RPAGPASAGRAAARA

SEQ ID NO: 17518 - protein, 15 aa, synthetic construct
RPAGQGHHPQGEGAA

SEQ ID NO: 17519 - protein, 15 aa, synthetic construct
RPAGQIQDRASEHAA

SEQ ID NO: 17520 - protein, 15 aa, synthetic construct
RPAGWMAGQGAWGLG

SEQ ID NO: 17521 - protein, 15 aa, synthetic construct
RPAHGRHHGAEARTR

SEQ ID NO: 17522 - protein, 15 aa, synthetic construct
RPAHPSAWPPAGPRR

SEQ ID NO: 17523 - protein, 15 aa, synthetic construct
RPAKTSRRPPSRGTR

SEQ ID NO: 17524 - protein, 15 aa, synthetic construct
RPALAAARDPPPVPG

SEQ ID NO: 17525 - protein, 15 aa, synthetic construct
RPALRGGQQQPPAAS

SEQ ID NO: 17526 - protein, 15 aa, synthetic construct
RPALRGPDSSSLWAA

SEQ ID NO: 17527 - protein, 15 aa, synthetic construct
RPAPAEPAVALVVAL

SEQ ID NO: 17528 - protein, 15 aa, synthetic construct
RPAPARHPVTSPWAA

SEQ ID NO: 17529 - protein, 15 aa, synthetic construct
RPAPASHAAVRPAAA

SEQ ID NO: 17530 - protein, 15 aa, synthetic construct
RPAPAVPERAQVARV

SEQ ID NO: 17531 - protein, 15 aa, synthetic construct
RPAPRPARDSARVPS

SEQ ID NO: 17532 - protein, 15 aa, synthetic construct
RPAPRPPRRRRAGSR

SEQ ID NO: 17533 - protein, 15 aa, synthetic construct
RPAPSRASEAAWLAR

SEQ ID NO: 17534 - protein, 15 aa, synthetic construct
RPARARGVPPHHLQQ

SEQ ID NO: 17535 - protein, 15 aa, synthetic construct
RPARGPGTPPGLGLG

SEQ ID NO: 17536 - protein, 15 aa, synthetic construct
RPARHHGALAQACWR

SEQ ID NO: 17537 - protein, 15 aa, synthetic construct
RPARPARRAPLTPRR

SEQ ID NO: 17538 - protein, 15 aa, synthetic construct
RPARPGPFTVPESRG

SEQ ID NO: 17539 - protein, 15 aa, synthetic construct
RPARTQESPTPRPAG

SEQ ID NO: 17540 - protein, 15 aa, synthetic construct
RPASSGSEAGPHRFR

SEQ ID NO: 17541 - protein, 15 aa, synthetic construct
RPASVCAPAASRCAA

SEQ ID NO: 17542 - protein, 15 aa, synthetic construct
RPATWSKSPWRSGPE

SEQ ID NO: 17543 - protein, 15 aa, synthetic construct
RPAWEPGDHHGKEAE

SEQ ID NO: 17544 - protein, 15 aa, synthetic construct
RPCGAPATPAAGPAP

SEQ ID NO: 17545 - protein, 15 aa, synthetic construct
RPDLAVRGPERRLHR

SEQ ID NO: 17546 - protein, 15 aa, synthetic construct
RPDPVLRAGSRLRRR

SEQ ID NO: 17547 - protein, 15 aa, synthetic construct
RPEGCPGEPGAPAPG

SEQ ID NO: 17548 - protein, 15 aa, synthetic construct
RPFQPVPVHVLGHHP

SEQ ID NO: 17549 - protein, 15 aa, synthetic construct
RPGAALRAAGLLLGA

SEQ ID NO: 17550 - protein, 15 aa, synthetic construct
RPGAGAPANVDPASV

SEQ ID NO: 17551 - protein, 15 aa, synthetic construct
RPGAGARTNVDPASV

SEQ ID NO: 17552 - protein, 15 aa, synthetic construct
RPGARNPGGGKPAGA

SEQ ID NO: 17553 - protein, 15 aa, synthetic construct
RPGDGVQTRPLPTQP

SEQ ID NO: 17554 - protein, 15 aa, synthetic construct
RPGDPAPEARLAQRA

SEQ ID NO: 17555 - protein, 15 aa, synthetic construct
RPGEGEAQLARVCTT

SEQ ID NO: 17556 - protein, 15 aa, synthetic construct
RPGEGREPRPEPGPG

SEQ ID NO: 17557 - protein, 15 aa, synthetic construct
RPGGAVGAPGATGVG

SEQ ID NO: 17558 - protein, 15 aa, synthetic construct
RPGGDPGRGRAHLHG

SEQ ID NO: 17559 - protein, 15 aa, synthetic construct
RPGGGAGGWGLGGRG

SEQ ID NO: 17560 - protein, 15 aa, synthetic construct
RPGLPLSSPAGGDPQ

SEQ ID NO: 17561 - protein, 15 aa, synthetic construct
RPGLPPAPPTATRAP

SEQ ID NO: 17562 - protein, 15 aa, synthetic construct
RPGLPPGPLSPGDAV

SEQ ID NO: 17563 - protein, 15 aa, synthetic construct
RPGLRAGLAARPAPG

SEQ ID NO: 17564 - protein, 15 aa, synthetic construct
RPGPAELPGARAAPA

SEQ ID NO: 17565 - protein, 15 aa, synthetic construct
RPGPPHGGQVVQGVP

SEQ ID NO: 17566 - protein, 15 aa, synthetic construct
RPGPPPGRRAPRALT

SEQ ID NO: 17567 - protein, 15 aa, synthetic construct
RPGRARPTPRAPSPR

SEQ ID NO: 17568 - protein, 15 aa, synthetic construct
RPGRGEDQYHQALRA

SEQ ID NO: 17569 - protein, 15 aa, synthetic construct
RPGRLRGSRGEASCG

SEQ ID NO: 17570 - protein, 15 aa, synthetic construct
RPGRPQPGPGSRGQL

SEQ ID NO: 17571 - protein, 15 aa, synthetic construct
RPGSAAGEAAAARAL

SEQ ID NO: 17572 - protein, 15 aa, synthetic construct
RPHGPAPQRHQVVRA

SEQ ID NO: 17573 - protein, 15 aa, synthetic construct
RPHHAAEPHAPVAAP

SEQ ID NO: 17574 - protein, 15 aa, synthetic construct
RPHQELGGGRGGPAG

SEQ ID NO: 17575 - protein, 15 aa, synthetic construct
RPISGTTGRAAGPWG

SEQ ID NO: 17576 - protein, 15 aa, synthetic construct
RPKAVGGQVHASPGP

SEQ ID NO: 17577 - protein, 15 aa, synthetic construct
RPKPHGRRRGGAGRC

SEQ ID NO: 17578 - protein, 15 aa, synthetic construct
RPLASLQPSGEPPHR

SEQ ID NO: 17579 - protein, 15 aa, synthetic construct
RPLGPRDSTSRSGQR

SEQ ID NO: 17580 - protein, 15 aa, synthetic construct
RPLGQPGQPRHPAGE

SEQ ID NO: 17581 - protein, 15 aa, synthetic construct
RPLGTAGSGGTSASP

SEQ ID NO: 17582 - protein, 15 aa, synthetic construct
RPLLHLRAPRSQPLR

SEQ ID NO: 17583 - protein, 15 aa, synthetic construct
RPLLRGVVRLRRPRH

SEQ ID NO: 17584 - protein, 15 aa, synthetic construct
RPLPAGAGRTGGGAA

SEQ ID NO: 17585 - protein, 15 aa, synthetic construct
RPLPARRAGEPGRAR

SEQ ID NO: 17586 - protein, 15 aa, synthetic construct
RPLPARRVPGLRPAA

SEQ ID NO: 17587 - protein, 15 aa, synthetic construct
RPLPKRGAVGPLRQE

SEQ ID NO: 17588 - protein, 15 aa, synthetic construct
RPLPPTALVAAALDS

SEQ ID NO: 17589 - protein, 15 aa, synthetic construct
RPLPQAQTFSQTERA

SEQ ID NO: 17590 - protein, 15 aa, synthetic construct
RPLPRRSPPSPRPCT

SEQ ID NO: 17591 - protein, 15 aa, synthetic construct
RPLQATSRLRSWGLG

SEQ ID NO: 17592 - protein, 15 aa, synthetic construct
RPLRGRLHAYHRGLP

SEQ ID NO: 17593 - protein, 15 aa, synthetic construct
RPLRQGLWSPRWIEN

SEQ ID NO: 17594 - protein, 15 aa, synthetic construct
RPPAAGPPAAAPAAA

SEQ ID NO: 17595 - protein, 15 aa, synthetic construct
RPPAAGPPAAAPAVV

SEQ ID NO: 17596 - protein, 15 aa, synthetic construct
RPPAAGPPATAPATV

SEQ ID NO: 17597 - protein, 15 aa, synthetic construct
RPPAAPAAPAAVPGP

SEQ ID NO: 17598 - protein, 15 aa, synthetic construct
RPPAGSPYSAGAVAA

SEQ ID NO: 17599 - protein, 15 aa, synthetic construct
RPPARARASARVAAG

SEQ ID NO: 17600 - protein, 15 aa, synthetic construct
RPPDARPRGRPSRGP

SEQ ID NO: 17601 - protein, 15 aa, synthetic construct
RPPGGALDPHAAALL

SEQ ID NO: 17602 - protein, 15 aa, synthetic construct
RPPHPHPQGDSAAAL

SEQ ID NO: 17603 - protein, 15 aa, synthetic construct
RPPPLSAAGRGSKDR

SEQ ID NO: 17604 - protein, 15 aa, synthetic construct
RPPPPTPTCGSTGPA

SEQ ID NO: 17605 - protein, 15 aa, synthetic construct
RPPRRGRRRRRRPRP

SEQ ID NO: 17606 - protein, 15 aa, synthetic construct
RPPRTVSAGPAAWHS

SEQ ID NO: 17607 - protein, 15 aa, synthetic construct
RPPSAPSAKGSTACT

SEQ ID NO: 17608 - protein, 15 aa, synthetic construct
RPPVAGPPATAPAVV

SEQ ID NO: 17609 - protein, 15 aa, synthetic construct
RPPVASRSPTATAPA

SEQ ID NO: 17610 - protein, 15 aa, synthetic construct
RPPVFLPLLQGRGQP

SEQ ID NO: 17611 - protein, 15 aa, synthetic construct
RPQAARLGQEHHGRP

SEQ ID NO: 17612 - protein, 15 aa, synthetic construct
RPQAGPGGAHHRDRL

SEQ ID NO: 17613 - protein, 15 aa, synthetic construct
RPQDSFTAFRPLPIP

SEQ ID NO: 17614 - protein, 15 aa, synthetic construct
RPQPGAPPVPPLPPA

SEQ ID NO: 17615 - protein, 15 aa, synthetic construct
RPQPRRRPACGGQAA

SEQ ID NO: 17616 - protein, 15 aa, synthetic construct
RPQSRGRSNSRSPAA

SEQ ID NO: 17617 - protein, 15 aa, synthetic construct
RPRAGSAGTCPPSRL

SEQ ID NO: 17618 - protein, 15 aa, synthetic construct
RPRALHARRGQRRRR

SEQ ID NO: 17619 - protein, 15 aa, synthetic construct
RPRARSLPARPRNPR

SEQ ID NO: 17620 - protein, 15 aa, synthetic construct
RPRASSGLGTGPTAA

SEQ ID NO: 17621 - protein, 15 aa, synthetic construct
RPRATAPWAWGHPAA

SEQ ID NO: 17622 - protein, 15 aa, synthetic construct
RPRCPDFRRPDASLT

SEQ ID NO: 17623 - protein, 15 aa, synthetic construct
RPRCSCRSAQCVGSR

SEQ ID NO: 17624 - protein, 15 aa, synthetic construct
RPRDGRAAAEARRPG

SEQ ID NO: 17625 - protein, 15 aa, synthetic construct
RPRDPGRPRRGRASP

SEQ ID NO: 17626 - protein, 15 aa, synthetic construct
RPRGAGLEQNPRTAP

SEQ ID NO: 17627 - protein, 15 aa, synthetic construct
RPRGPGGAGPRRLPT

SEQ ID NO: 17628 - protein, 15 aa, synthetic construct
RPRGRGCRVDTGGDR

SEQ ID NO: 17629 - protein, 15 aa, synthetic construct
RPRLDGPVVLSEQRP

SEQ ID NO: 17630 - protein, 15 aa, synthetic construct
RPRLPRPLPALHRGH

SEQ ID NO: 17631 - protein, 15 aa, synthetic construct
RPRLQPRRQSRPQPQ

SEQ ID NO: 17632 - protein, 15 aa, synthetic construct
RPRPERGSGHRRRCA

SEQ ID NO: 17633 - protein, 15 aa, synthetic construct
RPRPLPGLLCAGDPR

SEQ ID NO: 17634 - protein, 15 aa, synthetic construct
RPRPRHRSAPGPRPR

SEQ ID NO: 17635 - protein, 15 aa, synthetic construct
RPRPRQLRGPPGTPT

SEQ ID NO: 17636 - protein, 15 aa, synthetic construct
RPRPRRIARRAGGPR

SEQ ID NO: 17637 - protein, 15 aa, synthetic construct
RPRPVVLRRRRRRRR

SEQ ID NO: 17638 - protein, 15 aa, synthetic construct
RPRRAAASAAQPGSC

SEQ ID NO: 17639 - protein, 15 aa, synthetic construct
RPRRCPPSRPPRPRR

SEQ ID NO: 17640 - protein, 15 aa, synthetic construct
RPRRLRRLGKETMGR

SEQ ID NO: 17641 - protein, 15 aa, synthetic construct
RPRRRRNDPRAVPGL

SEQ ID NO: 17642 - protein, 15 aa, synthetic construct
RPRRRRPPACPRRAA

SEQ ID NO: 17643 - protein, 15 aa, synthetic construct
RPRRRRRSLGSTMRR

SEQ ID NO: 17644 - protein, 15 aa, synthetic construct
RPRRTRSSTRSSTRR

SEQ ID NO: 17645 - protein, 15 aa, synthetic construct
RPRRVPGGPPGTPRA

SEQ ID NO: 17646 - protein, 15 aa, synthetic construct
RPRSGCGQPRRPRRR

SEQ ID NO: 17647 - protein, 15 aa, synthetic construct
RPRTAPCAAQHREEA

SEQ ID NO: 17648 - protein, 15 aa, synthetic construct
RPRTPAQKPARSACC

SEQ ID NO: 17649 - protein, 15 aa, synthetic construct
RPRWAAEGRAAAAPR

SEQ ID NO: 17650 - protein, 15 aa, synthetic construct
RPRWRATTWLKSWRA

SEQ ID NO: 17651 - protein, 15 aa, synthetic construct
RPSAAGGGWQSGSAR

SEQ ID NO: 17652 - protein, 15 aa, synthetic construct
RPSAAGPRTRPASSG

SEQ ID NO: 17653 - protein, 15 aa, synthetic construct
RPSAPSPPARAPRDG

SEQ ID NO: 17654 - protein, 15 aa, synthetic construct
RPSARGPLAAAAAAR

SEQ ID NO: 17655 - protein, 15 aa, synthetic construct
RPSGALSFLGVQGTR

SEQ ID NO: 17656 - protein, 15 aa, synthetic construct
RPSPAWSRSPRGRPG

SEQ ID NO: 17657 - protein, 15 aa, synthetic construct
RPSPDLGPGSKPVPA

SEQ ID NO: 17658 - protein, 15 aa, synthetic construct
RPSPEPRGSAAAALA

SEQ ID NO: 17659 - protein, 15 aa, synthetic construct
RPSPSFRETMLTPQG

SEQ ID NO: 17660 - protein, 15 aa, synthetic construct
RPSPVPRPGACTRFL

SEQ ID NO: 17661 - protein, 15 aa, synthetic construct
RPSSSPEMRGKRRRK

SEQ ID NO: 17662 - protein, 15 aa, synthetic construct
RPSWGSWMPTGSGRT

SEQ ID NO: 17663 - protein, 15 aa, synthetic construct
RPTASPSAASTSSAS

SEQ ID NO: 17664 - protein, 15 aa, synthetic construct
RPTKSPRSPAGGAAL

SEQ ID NO: 17665 - protein, 15 aa, synthetic construct
RPTMNSVDIACLLSF

SEQ ID NO: 17666 - protein, 15 aa, synthetic construct
RPTNSSRSSSRTGSH

SEQ ID NO: 17667 - protein, 15 aa, synthetic construct
RPTPARLPRLQVPAS

SEQ ID NO: 17668 - protein, 15 aa, synthetic construct
RPTPGSVSPLAWSTP

SEQ ID NO: 17669 - protein, 15 aa, synthetic construct
RPTPPAARAVAPTPR

SEQ ID NO: 17670 - protein, 15 aa, synthetic construct
RPTPRPWGPRRCWPT

SEQ ID NO: 17671 - protein, 15 aa, synthetic construct
RPTRRSRRPLREPQE

SEQ ID NO: 17672 - protein, 15 aa, synthetic construct
RPTSHSRGWDEATGD

SEQ ID NO: 17673 - protein, 15 aa, synthetic construct
RPVGRLSGSATPHHG

SEQ ID NO: 17674 - protein, 15 aa, synthetic construct
RPVPAAQHRAHHALP

SEQ ID NO: 17675 - protein, 15 aa, synthetic construct
RPVQGQEDQRRHPAP

SEQ ID NO: 17676 - protein, 15 aa, synthetic construct
RPVSPSAAEDPCWRL

SEQ ID NO: 17677 - protein, 15 aa, synthetic construct
RPWDLPSTSAHQRLP

SEQ ID NO: 17678 - protein, 15 aa, synthetic construct
RPWPRRGADAGGGAG

SEQ ID NO: 17679 - protein, 15 aa, synthetic construct
RPWPSACSTPPRSTS

SEQ ID NO: 17680 - protein, 15 aa, synthetic construct
RPWRGAPRAEGRSGA

SEQ ID NO: 17681 - protein, 15 aa, synthetic construct
RPWSDPGGLSGNGTS

SEQ ID NO: 17682 - protein, 15 aa, synthetic construct
RQAATAPPLPDILSC

SEQ ID NO: 17683 - protein, 15 aa, synthetic construct
RQAGGRGRLQEAGHQ

SEQ ID NO: 17684 - protein, 15 aa, synthetic construct
RQAWEAESPVASTGP

SEQ ID NO: 17685 - protein, 15 aa, synthetic construct
RQDGAQVSWDKMGDC

SEQ ID NO: 17686 - protein, 15 aa, synthetic construct
RQDGDQCGAAGRAAR

SEQ ID NO: 17687 - protein, 15 aa, synthetic construct
RQDPQEEEVAKDPQR

SEQ ID NO: 17688 - protein, 15 aa, synthetic construct
RQDPQGQGGNCDLRS

SEQ ID NO: 17689 - protein, 15 aa, synthetic construct
RQDSAQGEQEGKGRE

SEQ ID NO: 17690 - protein, 15 aa, synthetic construct
RQEPQGARGSKRSVE

SEQ ID NO: 17691 - protein, 15 aa, synthetic construct
RQGLRAGLDGRVVGA

SEQ ID NO: 17692 - protein, 15 aa, synthetic construct
RQGRRRPQGQPAVPR

SEQ ID NO: 17693 - protein, 15 aa, synthetic construct
RQGSQGPGRQEAQGH

SEQ ID NO: 17694 - protein, 15 aa, synthetic construct
RQHAPASRLRESTQL

SEQ ID NO: 17695 - protein, 15 aa, synthetic construct
RQLDTEVVGELEEQA

SEQ ID NO: 17696 - protein, 15 aa, synthetic construct
RQLGGDGRGALQHRP

SEQ ID NO: 17697 - protein, 15 aa, synthetic construct
RQMPAHRDPDVQGHR

SEQ ID NO: 17698 - protein, 15 aa, synthetic construct
RQNGACPEADEAAEP

SEQ ID NO: 17699 - protein, 15 aa, synthetic construct
RQPAGAPGARGARRA

SEQ ID NO: 17700 - protein, 15 aa, synthetic construct
RQPEKQPGPRQAAHE

SEQ ID NO: 17701 - protein, 15 aa, synthetic construct
RQPGRLTGWPTTPRR

SEQ ID NO: 17702 - protein, 15 aa, synthetic construct
RQPWRRGQDLPEGPG

SEQ ID NO: 17703 - protein, 15 aa, synthetic construct
RQQPGRRLALGQQAA

SEQ ID NO: 17704 - protein, 15 aa, synthetic construct
RQQRGGGEGARRRQV

SEQ ID NO: 17705 - protein, 15 aa, synthetic construct
RQRAAAARADAPGAA

SEQ ID NO: 17706 - protein, 15 aa, synthetic construct
RQRAHHQVLPALQSA

SEQ ID NO: 17707 - protein, 15 aa, synthetic construct
RQRLPQTLPGPGGQQ

SEQ ID NO: 17708 - protein, 15 aa, synthetic construct
RQRPGRRGASAPRAG

SEQ ID NO: 17709 - protein, 15 aa, synthetic construct
RQRQDGAGAGAKHHS

SEQ ID NO: 17710 - protein, 15 aa, synthetic construct
RQRQLPAASQALQAA

SEQ ID NO: 17711 - protein, 15 aa, synthetic construct
RQSPLDILSPGGCNL

SEQ ID NO: 17712 - protein, 15 aa, synthetic construct
RQTPGASSRTRAAAA

SEQ ID NO: 17713 - protein, 15 aa, synthetic construct
RQWAARGRGSPGQPA

SEQ ID NO: 17714 - protein, 15 aa, synthetic construct
RQWRDLAGAKPSCFS

SEQ ID NO: 17715 - protein, 15 aa, synthetic construct
RRAAAALPRAAAGGR

SEQ ID NO: 17716 - protein, 15 aa, synthetic construct
RRAAAASSAGFRAAR

SEQ ID NO: 17717 - protein, 15 aa, synthetic construct
RRAAATSASSRCTAA

SEQ ID NO: 17718 - protein, 15 aa, synthetic construct
RRAAGATPTGPSSLT

SEQ ID NO: 17719 - protein, 15 aa, synthetic construct
RRAAPAAGRAAPARR

SEQ ID NO: 17720 - protein, 15 aa, synthetic construct
RRAGFQVWGLRAEER

SEQ ID NO: 17721 - protein, 15 aa, synthetic construct
RRAGGRRRNRRGSST

SEQ ID NO: 17722 - protein, 15 aa, synthetic construct
RRAGLPAAAGRGGGR

SEQ ID NO: 17723 - protein, 15 aa, synthetic construct
RRAGRREGRLRPGRR

SEQ ID NO: 17724 - protein, 15 aa, synthetic construct
RRAGSASGPSAAVAA

SEQ ID NO: 17725 - protein, 15 aa, synthetic construct
RRALEELREAEFRLH

SEQ ID NO: 17726 - protein, 15 aa, synthetic construct
RRALPRGARRASLLP

SEQ ID NO: 17727 - protein, 15 aa, synthetic construct
RRALTGSCGLAAAEP

SEQ ID NO: 17728 - protein, 15 aa, synthetic construct
RRAPARGGSLRAPTP

SEQ ID NO: 17729 - protein, 15 aa, synthetic construct
RRAPPRGPSPGCGSH

SEQ ID NO: 17730 - protein, 15 aa, synthetic construct
RRAPRAPLLAGRRGP

SEQ ID NO: 17731 - protein, 15 aa, synthetic construct
RRAPRPRPRLADPRP

SEQ ID NO: 17732 - protein, 15 aa, synthetic construct
RRAPSRATEVRAPLH

SEQ ID NO: 17733 - protein, 15 aa, synthetic construct
RRAQFTAAAPSPWPR

SEQ ID NO: 17734 - protein, 15 aa, synthetic construct
RRARGGGALSGEGAP

SEQ ID NO: 17735 - protein, 15 aa, synthetic construct
RRARLHGGGPRVPDR

SEQ ID NO: 17736 - protein, 15 aa, synthetic construct
RRARPAAAGRRAAAS

SEQ ID NO: 17737 - protein, 15 aa, synthetic construct
RRARPSGRLGAALFP

SEQ ID NO: 17738 - protein, 15 aa, synthetic construct
RRARQARGTGAAAVP

SEQ ID NO: 17739 - protein, 15 aa, synthetic construct
RRARQRPLPPVPAAA

SEQ ID NO: 17740 - protein, 15 aa, synthetic construct
RRARRGAGPEELERE

SEQ ID NO: 17741 - protein, 15 aa, synthetic construct
RRARRGSARSWTASG

SEQ ID NO: 17742 - protein, 15 aa, synthetic construct
RRARVRSRGPASIST

SEQ ID NO: 17743 - protein, 15 aa, synthetic construct
RRATGAAGPLAAAAA

SEQ ID NO: 17744 - protein, 15 aa, synthetic construct
RRATPHCSSPRPGAT

SEQ ID NO: 17745 - protein, 15 aa, synthetic construct
RRATRNDRTTSYRPW

SEQ ID NO: 17746 - protein, 15 aa, synthetic construct
RRAWRGQDQHHQALR

SEQ ID NO: 17747 - protein, 15 aa, synthetic construct
RRAWRPGAGARARAH

SEQ ID NO: 17748 - protein, 15 aa, synthetic construct
RRCAARRRRSPPTRP

SEQ ID NO: 17749 - protein, 15 aa, synthetic construct
RRCCCAPGTRRGARA

SEQ ID NO: 17750 - protein, 15 aa, synthetic construct
RRCDPGDRAGRPGHA

SEQ ID NO: 17751 - protein, 15 aa, synthetic construct
RRCFSRRPLQHLLRR

SEQ ID NO: 17752 - protein, 15 aa, synthetic construct
RRCGPRRCRRSTSRP

SEQ ID NO: 17753 - protein, 15 aa, synthetic construct
RRCPARVRGPTGRSV

SEQ ID NO: 17754 - protein, 15 aa, synthetic construct
RRCPGVHAGPGRPVP

SEQ ID NO: 17755 - protein, 15 aa, synthetic construct
RRCRAGGLPPADDVH

SEQ ID NO: 17756 - protein, 15 aa, synthetic construct
RRCRRRRRRPWPATT

SEQ ID NO: 17757 - protein, 15 aa, synthetic construct
RRCRSRGLTKMAAAV

SEQ ID NO: 17758 - protein, 15 aa, synthetic construct
RRDCQRRPGADAAQG

SEQ ID NO: 17759 - protein, 15 aa, synthetic construct
RRDGQAQERGAHHRY

SEQ ID NO: 17760 - protein, 15 aa, synthetic construct
RRDLAARARGAEPVQ

SEQ ID NO: 17761 - protein, 15 aa, synthetic construct
RRDLQEAGQALENAE

SEQ ID NO: 17762 - protein, 15 aa, synthetic construct
RRDRGVPRGLPVRAR

SEQ ID NO: 17763 - protein, 15 aa, synthetic construct
RREDGGGGSPGTELR

SEQ ID NO: 17764 - protein, 15 aa, synthetic construct
RREEDSGGNSTLGAT

SEQ ID NO: 17765 - protein, 15 aa, synthetic construct
RREEHAEPQAGGSAV

SEQ ID NO: 17766 - protein, 15 aa, synthetic construct
RREGGGQRAAAARDA

SEQ ID NO: 17767 - protein, 15 aa, synthetic construct
RREGRGRRGRGRGVG

SEQ ID NO: 17768 - protein, 15 aa, synthetic construct
RRELGLGRRPRAGNR

SEQ ID NO: 17769 - protein, 15 aa, synthetic construct
RREPLGPPAAANAAA

SEQ ID NO: 17770 - protein, 15 aa, synthetic construct
RREPLHDRVRYLQGL

SEQ ID NO: 17771 - protein, 15 aa, synthetic construct
RREPRAPPPATGAGP

SEQ ID NO: 17772 - protein, 15 aa, synthetic construct
RREPRPHGAAAAVAA

SEQ ID NO: 17773 - protein, 15 aa, synthetic construct
RREPTEPLTPRRRCR

SEQ ID NO: 17774 - protein, 15 aa, synthetic construct
RRGAAALAGGPAAVG

SEQ ID NO: 17775 - protein, 15 aa, synthetic construct
RRGAGGAAEAGPGQP

SEQ ID NO: 17776 - protein, 15 aa, synthetic construct
RRGAKTTPEWARMPP

SEQ ID NO: 17777 - protein, 15 aa, synthetic construct
RRGAQEVQAEAAVGA

SEQ ID NO: 17778 - protein, 15 aa, synthetic construct
RRGAQISASEGAAPP

SEQ ID NO: 17779 - protein, 15 aa, synthetic construct
RRGCGSRPRRGRQRR

SEQ ID NO: 17780 - protein, 15 aa, synthetic construct
RRGEAATFNQFGCQG

SEQ ID NO: 17781 - protein, 15 aa, synthetic construct
RRGGAAAERRGAGAR

SEQ ID NO: 17782 - protein, 15 aa, synthetic construct
RRGGEAPGRAAPQGT

SEQ ID NO: 17783 - protein, 15 aa, synthetic construct
RRGGGALPDAQVPGL

SEQ ID NO: 17784 - protein, 15 aa, synthetic construct
RRGGGAVQGLAGVRR

SEQ ID NO: 17785 - protein, 15 aa, synthetic construct
RRGGGGRGPPRPQPQ

SEQ ID NO: 17786 - protein, 15 aa, synthetic construct
RRGGGQDVPTHELCQ

SEQ ID NO: 17787 - protein, 15 aa, synthetic construct
RRGGGRAEQRGLPHR

SEQ ID NO: 17788 - protein, 15 aa, synthetic construct
RRGGPAAHLRLPGPG

SEQ ID NO: 17789 - protein, 15 aa, synthetic construct
RRGGPGGAGAARRAR

SEQ ID NO: 17790 - protein, 15 aa, synthetic construct
RRGGRASGGAGGGPA

SEQ ID NO: 17791 - protein, 15 aa, synthetic construct
RRGGRRRRGDWRRER

SEQ ID NO: 17792 - protein, 15 aa, synthetic construct
RRGHCARRSRRRRQV

SEQ ID NO: 17793 - protein, 15 aa, synthetic construct
RRGHGRVAARARRSR

SEQ ID NO: 17794 - protein, 15 aa, synthetic construct
RRGLGRRLWPRRLPK

SEQ ID NO: 17795 - protein, 15 aa, synthetic construct
RRGLGWGNEPGGAAG

SEQ ID NO: 17796 - protein, 15 aa, synthetic construct
RRGLPRGTGGPAAPG

SEQ ID NO: 17797 - protein, 15 aa, synthetic construct
RRGLPVEPGAVPAGA

SEQ ID NO: 17798 - protein, 15 aa, synthetic construct
RRGNFRSRVLRRKSR

SEQ ID NO: 17799 - protein, 15 aa, synthetic construct
RRGPARRSPPSASRT

SEQ ID NO: 17800 - protein, 15 aa, synthetic construct
RRGQAGRRRRLRRED

SEQ ID NO: 17801 - protein, 15 aa, synthetic construct
RRGQARAGRLAPGGP

SEQ ID NO: 17802 - protein, 15 aa, synthetic construct
RRGQEPGEDAPSPAL

SEQ ID NO: 17803 - protein, 15 aa, synthetic construct
RRGQPELRGGAGERG

SEQ ID NO: 17804 - protein, 15 aa, synthetic construct
RRGQRGQEDLAAPGS

SEQ ID NO: 17805 - protein, 15 aa, synthetic construct
RRGRCGRRRPRLRRL

SEQ ID NO: 17806 - protein, 15 aa, synthetic construct
RRGRFVSKGLRLRRG

SEQ ID NO: 17807 - protein, 15 aa, synthetic construct
RRGRGADGDGRAALA

SEQ ID NO: 17808 - protein, 15 aa, synthetic construct
RRGRGRAGGAGGGRD

SEQ ID NO: 17809 - protein, 15 aa, synthetic construct
RRGRGRGRARGPRAA

SEQ ID NO: 17810 - protein, 15 aa, synthetic construct
RRGRGRGRRRPRGLR

SEQ ID NO: 17811 - protein, 15 aa, synthetic construct
RRGRPGRRATAGRRR

SEQ ID NO: 17812 - protein, 15 aa, synthetic construct
RRGRRATAAGLAARA

SEQ ID NO: 17813 - protein, 15 aa, synthetic construct
RRGRRPRGRVATSPF

SEQ ID NO: 17814 - protein, 15 aa, synthetic construct
RRGRRRGLGHGTGGR

SEQ ID NO: 17815 - protein, 15 aa, synthetic construct
RRGSEGARAAGVAGP

SEQ ID NO: 17816 - protein, 15 aa, synthetic construct
RRGSRAAARPASCSA

SEQ ID NO: 17817 - protein, 15 aa, synthetic construct
RRGSRAAEPGPRAAS

SEQ ID NO: 17818 - protein, 15 aa, synthetic construct
RRGSRVGGGSRPGLG

SEQ ID NO: 17819 - protein, 15 aa, synthetic construct
RRIGARTTVSCSAPT

SEQ ID NO: 17820 - protein, 15 aa, synthetic construct
RRILGGRGRLRGRRG

SEQ ID NO: 17821 - protein, 15 aa, synthetic construct
RRISKSSAAAPTRTY

SEQ ID NO: 17822 - protein, 15 aa, synthetic construct
RRKKGSLKMGKSVTT

SEQ ID NO: 17823 - protein, 15 aa, synthetic construct
RRKMSSFKRRWRRFA

SEQ ID NO: 17824 - protein, 15 aa, synthetic construct
RRKPREEPERAGAQG

SEQ ID NO: 17825 - protein, 15 aa, synthetic construct
RRKPRQGSGAQRPGL

SEQ ID NO: 17826 - protein, 15 aa, synthetic construct
RRKRCCVCSSGRGLF

SEQ ID NO: 17827 - protein, 15 aa, synthetic construct
RRLAPARRRAPGTPR

SEQ ID NO: 17828 - protein, 15 aa, synthetic construct
RRLDPAGHEAVPPGH

SEQ ID NO: 17829 - protein, 15 aa, synthetic construct
RRLGPGPRAPGLGSR

SEQ ID NO: 17830 - protein, 15 aa, synthetic construct
RRLGPVGAPGTPTEG

SEQ ID NO: 17831 - protein, 15 aa, synthetic construct
RRLLRGVPGGGEPQP

SEQ ID NO: 17832 - protein, 15 aa, synthetic construct
RRLLRRHRQPRAVPQ

SEQ ID NO: 17833 - protein, 15 aa, synthetic construct
RRLPAAAPSRARACV

SEQ ID NO: 17834 - protein, 15 aa, synthetic construct
RRLPGRQAGAPVRAR

SEQ ID NO: 17835 - protein, 15 aa, synthetic construct
RRLPPRAPAARHARG

SEQ ID NO: 17836 - protein, 15 aa, synthetic construct
RRLPPRPQRLRLAGP

SEQ ID NO: 17837 - protein, 15 aa, synthetic construct
RRLRGLLLQPLPGLH

SEQ ID NO: 17838 - protein, 15 aa, synthetic construct
RRLRGRAAFGARSSD

SEQ ID NO: 17839 - protein, 15 aa, synthetic construct
RRLRGRGLPETRRAR

SEQ ID NO: 17840 - protein, 15 aa, synthetic construct
RRLRPAGGPRAPPRP

SEQ ID NO: 17841 - protein, 15 aa, synthetic construct
RRLSLRRRRRMVRSV

SEQ ID NO: 17842 - protein, 15 aa, synthetic construct
RRLSSNRAGSSTTAS

SEQ ID NO: 17843 - protein, 15 aa, synthetic construct
RRLWRRVPGVRRSPS

SEQ ID NO: 17844 - protein, 15 aa, synthetic construct
RRNPPTPPARTPSSL

SEQ ID NO: 17845 - protein, 15 aa, synthetic construct
RRNREKATRRKSNGD

SEQ ID NO: 17846 - protein, 15 aa, synthetic construct
RRPAGARPISPGRLR

SEQ ID NO: 17847 - protein, 15 aa, synthetic construct
RRPCLFPRRHGDGPP

SEQ ID NO: 17848 - protein, 15 aa, synthetic construct
RRPDPGAPPPGGDPG

SEQ ID NO: 17849 - protein, 15 aa, synthetic construct
RRPEAAAAPGPALGQ

SEQ ID NO: 17850 - protein, 15 aa, synthetic construct
RRPEAAAQRQQELSK

SEQ ID NO: 17851 - protein, 15 aa, synthetic construct
RRPELVQDPEWAHQA

SEQ ID NO: 17852 - protein, 15 aa, synthetic construct
RRPGAGTASSAGPAC

SEQ ID NO: 17853 - protein, 15 aa, synthetic construct
RRPGAPRRSSSLTAE

SEQ ID NO: 17854 - protein, 15 aa, synthetic construct
RRPGGAAAARPQRAG

SEQ ID NO: 17855 - protein, 15 aa, synthetic construct
RRPGGLIPGRTPVLD

SEQ ID NO: 17856 - protein, 15 aa, synthetic construct
RRPGSRGGGGAAAMP

SEQ ID NO: 17857 - protein, 15 aa, synthetic construct
RRPLADRPQGRRRRR

SEQ ID NO: 17858 - protein, 15 aa, synthetic construct
RRPLQVDAPWQAWEP

SEQ ID NO: 17859 - protein, 15 aa, synthetic construct
RRPLTRLRRRMERSA

SEQ ID NO: 17860 - protein, 15 aa, synthetic construct
RRPPAAAATGTGTRR

SEQ ID NO: 17861 - protein, 15 aa, synthetic construct
RRPPAALWGQEAAPG

SEQ ID NO: 17862 - protein, 15 aa, synthetic construct
RRPPASAQTSTALRS

SEQ ID NO: 17863 - protein, 15 aa, synthetic construct
RRPPGLPRGPRLPAL

SEQ ID NO: 17864 - protein, 15 aa, synthetic construct
RRPPPMGASRLQPSA

SEQ ID NO: 17865 - protein, 15 aa, synthetic construct
RRPPPPPPPPPPWRR

SEQ ID NO: 17866 - protein, 15 aa, synthetic construct
RRPPRSPSTSSRSCG

SEQ ID NO: 17867 - protein, 15 aa, synthetic construct
RRPPSPTRTGSARVT

SEQ ID NO: 17868 - protein, 15 aa, synthetic construct
RRPQKAEEPAPQAGG

SEQ ID NO: 17869 - protein, 15 aa, synthetic construct
RRPRCRPKAPRPGPP

SEQ ID NO: 17870 - protein, 15 aa, synthetic construct
RRPRERRLSGPRQAS

SEQ ID NO: 17871 - protein, 15 aa, synthetic construct
RRPRRQRPGQEQGQG

SEQ ID NO: 17872 - protein, 15 aa, synthetic construct
RRPRSAAPRTSPRCS

SEQ ID NO: 17873 - protein, 15 aa, synthetic construct
RRPRSRRGEGAEAPA

SEQ ID NO: 17874 - protein, 15 aa, synthetic construct
RRPVAGRRRRARRAP

SEQ ID NO: 17875 - protein, 15 aa, synthetic construct
RRPVFAVPGAAEGLP

SEQ ID NO: 17876 - protein, 15 aa, synthetic construct
RRPWPSACCAPCGAQ

SEQ ID NO: 17877 - protein, 15 aa, synthetic construct
RRPWSRARRSAGAGA

SEQ ID NO: 17878 - protein, 15 aa, synthetic construct
RRPWSSPTARRASPA

SEQ ID NO: 17879 - protein, 15 aa, synthetic construct
RRQALELLHLPSAEA

SEQ ID NO: 17880 - protein, 15 aa, synthetic construct
RRQHRGGQAGGGPED

SEQ ID NO: 17881 - protein, 15 aa, synthetic construct
RRQHRGGQVGEGPED

SEQ ID NO: 17882 - protein, 15 aa, synthetic construct
RRQIAQELGGGRRWA

SEQ ID NO: 17883 - protein, 15 aa, synthetic construct
RRQLRHPEKTTPPGL

SEQ ID NO: 17884 - protein, 15 aa, synthetic construct
RRQPGAQQQPEEERQ

SEQ ID NO: 17885 - protein, 15 aa, synthetic construct
RRQREYGAEPGTGQE

SEQ ID NO: 17886 - protein, 15 aa, synthetic construct
RRQRGPFPPGPGESL

SEQ ID NO: 17887 - protein, 15 aa, synthetic construct
RRQRPSAGARGRGVG

SEQ ID NO: 17888 - protein, 15 aa, synthetic construct
RRQRRGGAPSSLRAP

SEQ ID NO: 17889 - protein, 15 aa, synthetic construct
RRQVLAGEEPAQAVP

SEQ ID NO: 17890 - protein, 15 aa, synthetic construct
RRRAAAGAQARSRRR

SEQ ID NO: 17891 - protein, 15 aa, synthetic construct
RRRAAARRESRSSCA

SEQ ID NO: 17892 - protein, 15 aa, synthetic construct
RRRAAGTPVAAAARQ

SEQ ID NO: 17893 - protein, 15 aa, synthetic construct
RRRAGPGRRGRRGGG

SEQ ID NO: 17894 - protein, 15 aa, synthetic construct
RRRAGPPTRTAGLLG

SEQ ID NO: 17895 - protein, 15 aa, synthetic construct
RRRAPSAPAAAGGGG

SEQ ID NO: 17896 - protein, 15 aa, synthetic construct
RRRARRFTSSTSGPA

SEQ ID NO: 17897 - protein, 15 aa, synthetic construct
RRRCCRRRRRRRRRP

SEQ ID NO: 17898 - protein, 15 aa, synthetic construct
RRRDHLGRDRRSRTP

SEQ ID NO: 17899 - protein, 15 aa, synthetic construct
RRREDGRARTLALAQ

SEQ ID NO: 17900 - protein, 15 aa, synthetic construct
RRREREGARRRPTPI

SEQ ID NO: 17901 - protein, 15 aa, synthetic construct
RRRGAPGPAPPAVRD

SEQ ID NO: 17902 - protein, 15 aa, synthetic construct
RRRGARAEPIRTGPS

SEQ ID NO: 17903 - protein, 15 aa, synthetic construct
RRRGDPGAAAAALPR

SEQ ID NO: 17904 - protein, 15 aa, synthetic construct
RRRGGALPDAQVPGL

SEQ ID NO: 17905 - protein, 15 aa, synthetic construct
RRRGGARGRGRWGHR

SEQ ID NO: 17906 - protein, 15 aa, synthetic construct
RRRGGGRALAGRPRH

SEQ ID NO: 17907 - protein, 15 aa, synthetic construct
RRRGGGRPRGAAAAA

SEQ ID NO: 17908 - protein, 15 aa, synthetic construct
RRRGGRRAGGGAAGK

SEQ ID NO: 17909 - protein, 15 aa, synthetic construct
RRRGGRRGRGRRGRG

SEQ ID NO: 17910 - protein, 15 aa, synthetic construct
RRRGLGSRTRRAWRA

SEQ ID NO: 17911 - protein, 15 aa, synthetic construct
RRRGPGRSPSELGAA

SEQ ID NO: 17912 - protein, 15 aa, synthetic construct
RRRGPTGRPRRPPPG

SEQ ID NO: 17913 - protein, 15 aa, synthetic construct
RRRGRAGSVAGDGGA

SEQ ID NO: 17914 - protein, 15 aa, synthetic construct
RRRGRGPRVWAPRGR

SEQ ID NO: 17915 - protein, 15 aa, synthetic construct
RRRGRGSRRRRGRPS

SEQ ID NO: 17916 - protein, 15 aa, synthetic construct
RRRGRPGPHREDELR

SEQ ID NO: 17917 - protein, 15 aa, synthetic construct
RRRGRSAPRARRSFA

SEQ ID NO: 17918 - protein, 15 aa, synthetic construct
RRRGSCGRGRGASLP

SEQ ID NO: 17919 - protein, 15 aa, synthetic construct
RRRHHHRLRRRLRRC

SEQ ID NO: 17920 - protein, 15 aa, synthetic construct
RRRHPGPRQRGRRRR

SEQ ID NO: 17921 - protein, 15 aa, synthetic construct
RRRKAAFSTGRWRTA

SEQ ID NO: 17922 - protein, 15 aa, synthetic construct
RRRLAARRSRRPGPR

SEQ ID NO: 17923 - protein, 15 aa, synthetic construct
RRRLDQSRVPSSCTK

SEQ ID NO: 17924 - protein, 15 aa, synthetic construct
RRRLRARAVPGLRPL

SEQ ID NO: 17925 - protein, 15 aa, synthetic construct
RRRLRLACHRGLYEN

SEQ ID NO: 17926 - protein, 15 aa, synthetic construct
RRRLRRRPDRVRRAA

SEQ ID NO: 17927 - protein, 15 aa, synthetic construct
RRRNPSSTYQAAATP

SEQ ID NO: 17928 - protein, 15 aa, synthetic construct
RRRPAGGQGSPAAPW

SEQ ID NO: 17929 - protein, 15 aa, synthetic construct
RRRPARVRLPRGRLG

SEQ ID NO: 17930 - protein, 15 aa, synthetic construct
RRRPGGERRRPGGER

SEQ ID NO: 17931 - protein, 15 aa, synthetic construct
RRRPGRASPPGWSVC

SEQ ID NO: 17932 - protein, 15 aa, synthetic construct
RRRPGRGVGRGPLSA

SEQ ID NO: 17933 - protein, 15 aa, synthetic construct
RRRPGRRPPTCSRAS

SEQ ID NO: 17934 - protein, 15 aa, synthetic construct
RRRPLQKLSKRGASR

SEQ ID NO: 17935 - protein, 15 aa, synthetic construct
RRRPLSGAPELPPRL

SEQ ID NO: 17936 - protein, 15 aa, synthetic construct
RRRPPPPGSRSPTRR

SEQ ID NO: 17937 - protein, 15 aa, synthetic construct
RRRPREDGLGPGGEE

SEQ ID NO: 17938 - protein, 15 aa, synthetic construct
RRRPRGTWPTPMGSC

SEQ ID NO: 17939 - protein, 15 aa, synthetic construct
RRRPRHVRRRERHRL

SEQ ID NO: 17940 - protein, 15 aa, synthetic construct
RRRPRRPPRPRTPSR

SEQ ID NO: 17941 - protein, 15 aa, synthetic construct
RRRPRRRVGLRAAAL

SEQ ID NO: 17942 - protein, 15 aa, synthetic construct
RRRPSPRYRLRAPPR

SEQ ID NO: 17943 - protein, 15 aa, synthetic construct
RRRPSTPSSPAWPPA

SEQ ID NO: 17944 - protein, 15 aa, synthetic construct
RRRPVPGLPETPSPL

SEQ ID NO: 17945 - protein, 15 aa, synthetic construct
RRRQPRMRRRRTTAR

SEQ ID NO: 17946 - protein, 15 aa, synthetic construct
RRRQQRGRRAEPPRR

SEQ ID NO: 17947 - protein, 15 aa, synthetic construct
RRRRACTYGSMLTRQ

SEQ ID NO: 17948 - protein, 15 aa, synthetic construct
RRRRADSCPGCGRRG

SEQ ID NO: 17949 - protein, 15 aa, synthetic construct
RRRRAGQPGPGQARQ

SEQ ID NO: 17950 - protein, 15 aa, synthetic construct
RRRRAGTLRLGVAAV

SEQ ID NO: 17951 - protein, 15 aa, synthetic construct
RRRRAPALPRTPTPI

SEQ ID NO: 17952 - protein, 15 aa, synthetic construct
RRRRCRPEARWCPGR

SEQ ID NO: 17953 - protein, 15 aa, synthetic construct
RRRRCRRPGRVHPDP

SEQ ID NO: 17954 - protein, 15 aa, synthetic construct
RRRREDPAGGPRPRR

SEQ ID NO: 17955 - protein, 15 aa, synthetic construct
RRRRGAAHGEDGVRA

SEQ ID NO: 17956 - protein, 15 aa, synthetic construct
RRRRGAGPPKGLGLC

SEQ ID NO: 17957 - protein, 15 aa, synthetic construct
RRRRGDCAASSSPAR

SEQ ID NO: 17958 - protein, 15 aa, synthetic construct
RRRRGEARPREQRPP

SEQ ID NO: 17959 - protein, 15 aa, synthetic construct
RRRRGGSLRRRLGHG

SEQ ID NO: 17960 - protein, 15 aa, synthetic construct
RRRRGHPASRLFRAL

SEQ ID NO: 17961 - protein, 15 aa, synthetic construct
RRRRGLAQQAHAPHP

SEQ ID NO: 17962 - protein, 15 aa, synthetic construct
RRRRGQQAGAPRARL

SEQ ID NO: 17963 - protein, 15 aa, synthetic construct
RRRRGRARRGLQGGA

SEQ ID NO: 17964 - protein, 15 aa, synthetic construct
RRRRGRRRGHGPRVV

SEQ ID NO: 17965 - protein, 15 aa, synthetic construct
RRRRHPHHPSVPGRL

SEQ ID NO: 17966 - protein, 15 aa, synthetic construct
RRRRLLPALLGQERG

SEQ ID NO: 17967 - protein, 15 aa, synthetic construct
RRRRLRRRRQRWRRR

SEQ ID NO: 17968 - protein, 15 aa, synthetic construct
RRRRPAGDGAASGRL

SEQ ID NO: 17969 - protein, 15 aa, synthetic construct
RRRRPAPGVPPSSRR

SEQ ID NO: 17970 - protein, 15 aa, synthetic construct
RRRRPCREPRLQPPP

SEQ ID NO: 17971 - protein, 15 aa, synthetic construct
RRRRPGPGRAQRLRE

SEQ ID NO: 17972 - protein, 15 aa, synthetic construct
RRRRPGPRARASHPQ

SEQ ID NO: 17973 - protein, 15 aa, synthetic construct
RRRRPGRGPRLPAAP

SEQ ID NO: 17974 - protein, 15 aa, synthetic construct
RRRRPGSSGPERQRR

SEQ ID NO: 17975 - protein, 15 aa, synthetic construct
RRRRPRRCGARLRGR

SEQ ID NO: 17976 - protein, 15 aa, synthetic construct
RRRRPSSCSRSLWLC

SEQ ID NO: 17977 - protein, 15 aa, synthetic construct
RRRRPVPRAPRPRRG

SEQ ID NO: 17978 - protein, 15 aa, synthetic construct
RRRRQEKPERPQCCG

SEQ ID NO: 17979 - protein, 15 aa, synthetic construct
RRRRQLLSGEAGAAC

SEQ ID NO: 17980 - protein, 15 aa, synthetic construct
RRRRRFPRAPGAPGG

SEQ ID NO: 17981 - protein, 15 aa, synthetic construct
RRRRRGGGGGGPRTR

SEQ ID NO: 17982 - protein, 15 aa, synthetic construct
RRRRRGGRRRLVSGR

SEQ ID NO: 17983 - protein, 15 aa, synthetic construct
RRRRRGPDLLLPPAG

SEQ ID NO: 17984 - protein, 15 aa, synthetic construct
RRRRRGRPWLLWWWR

SEQ ID NO: 17985 - protein, 15 aa, synthetic construct
RRRRRPAAGNWRSGS

SEQ ID NO: 17986 - protein, 15 aa, synthetic construct
RRRRRPRSDCMQGPR

SEQ ID NO: 17987 - protein, 15 aa, synthetic construct
RRRRRQGHPLLPRLP

SEQ ID NO: 17988 - protein, 15 aa, synthetic construct
RRRRRQRQQQQQQRH

SEQ ID NO: 17989 - protein, 15 aa, synthetic construct
RRRRRRCPRRSRVPG

SEQ ID NO: 17990 - protein, 15 aa, synthetic construct
RRRRRRRRPWADAAR

SEQ ID NO: 17991 - protein, 15 aa, synthetic construct
RRRRRRRRQRRGSGG

SEQ ID NO: 17992 - protein, 15 aa, synthetic construct
RRRRRRSVPEPSVRG

SEQ ID NO: 17993 - protein, 15 aa, synthetic construct
RRRRRRTRRPPSWPS

SEQ ID NO: 17994 - protein, 15 aa, synthetic construct
RRRRRSPGPAREARG

SEQ ID NO: 17995 - protein, 15 aa, synthetic construct
RRRRRSPKAWPMCSA

SEQ ID NO: 17996 - protein, 15 aa, synthetic construct
RRRRRWPPAPLDRPA

SEQ ID NO: 17997 - protein, 15 aa, synthetic construct
RRRRTAAPWRSSLLR

SEQ ID NO: 17998 - protein, 15 aa, synthetic construct
RRRRTRRRTRRRTSP

SEQ ID NO: 17999 - protein, 15 aa, synthetic construct
RRRRWRRRRWQQLQP

SEQ ID NO: 18000 - protein, 15 aa, synthetic construct
RRRRYPRGWRPSPPR

SEQ ID NO: 18001 - protein, 15 aa, synthetic construct
RRRSERNPGSEHSTY

SEQ ID NO: 18002 - protein, 15 aa, synthetic construct
RRRSGTAPDCCRPAT

SEQ ID NO: 18003 - protein, 15 aa, synthetic construct
RRRSPGTGRRRSGWA

SEQ ID NO: 18004 - protein, 15 aa, synthetic construct
RRRSPNYGDEACLWL

SEQ ID NO: 18005 - protein, 15 aa, synthetic construct
RRRSPRTQRGVGPAS

SEQ ID NO: 18006 - protein, 15 aa, synthetic construct
RRRSPSLSPRPPRRP

SEQ ID NO: 18007 - protein, 15 aa, synthetic construct
RRRSRRPPPPQCPRR

SEQ ID NO: 18008 - protein, 15 aa, synthetic construct
RRRSWVRRRPQPFPP

SEQ ID NO: 18009 - protein, 15 aa, synthetic construct
RRRTGFLPKPPGWRR

SEQ ID NO: 18010 - protein, 15 aa, synthetic construct
RRRVDPEGQLHPQTR

SEQ ID NO: 18011 - protein, 15 aa, synthetic construct
RRRVHCSRRELSSDP

SEQ ID NO: 18012 - protein, 15 aa, synthetic construct
RRRWDLPAPRPAARA

SEQ ID NO: 18013 - protein, 15 aa, synthetic construct
RRRWRGHRRRTPGER

SEQ ID NO: 18014 - protein, 15 aa, synthetic construct
RRRWRPRPLWRRRPR

SEQ ID NO: 18015 - protein, 15 aa, synthetic construct
RRSALPRAPPMRPPS

SEQ ID NO: 18016 - protein, 15 aa, synthetic construct
RRSCKTGSKTCWTMA

SEQ ID NO: 18017 - protein, 15 aa, synthetic construct
RRSCSAPSATTPSAT

SEQ ID NO: 18018 - protein, 15 aa, synthetic construct
RRSGAAAAPAAAALA

SEQ ID NO: 18019 - protein, 15 aa, synthetic construct
RRSGGAAPSRPGGPR

SEQ ID NO: 18020 - protein, 15 aa, synthetic construct
RRSLCAGDATMRKAG

SEQ ID NO: 18021 - protein, 15 aa, synthetic construct
RRSRPIPTSRSSSWP

SEQ ID NO: 18022 - protein, 15 aa, synthetic construct
RRSRRGARARAVRHA

SEQ ID NO: 18023 - protein, 15 aa, synthetic construct
RRSRRQRGRRQPGCA

SEQ ID NO: 18024 - protein, 15 aa, synthetic construct
RRSRSAPRPRGPLRR

SEQ ID NO: 18025 - protein, 15 aa, synthetic construct
RRSSAAGSAFHVSIY

SEQ ID NO: 18026 - protein, 15 aa, synthetic construct
RRSTPFGAAGTAGLR

SEQ ID NO: 18027 - protein, 15 aa, synthetic construct
RRSWRVRGGLQEEGG

SEQ ID NO: 18028 - protein, 15 aa, synthetic construct
RRTGDGPLALASELP

SEQ ID NO: 18029 - protein, 15 aa, synthetic construct
RRTHSVPAAAEAQAL

SEQ ID NO: 18030 - protein, 15 aa, synthetic construct
RRTRRMAPRVVESAA

SEQ ID NO: 18031 - protein, 15 aa, synthetic construct
RRVETFVGDGEAAVH

SEQ ID NO: 18032 - protein, 15 aa, synthetic construct
RRVLAPGLRAAARAT

SEQ ID NO: 18033 - protein, 15 aa, synthetic construct
RRVLASLRAHTAGAL

SEQ ID NO: 18034 - protein, 15 aa, synthetic construct
RRVPAGLGRISRRDL

SEQ ID NO: 18035 - protein, 15 aa, synthetic construct
RRVPGPSRRPRQEPP

SEQ ID NO: 18036 - protein, 15 aa, synthetic construct
RRVSGQETSRKSGSR

SEQ ID NO: 18037 - protein, 15 aa, synthetic construct
RRVTGRCAGCYCSAC

SEQ ID NO: 18038 - protein, 15 aa, synthetic construct
RRWAAAPEPRTRAPC

SEQ ID NO: 18039 - protein, 15 aa, synthetic construct
RRWRPRGAPLPPGCG

SEQ ID NO: 18040 - protein, 15 aa, synthetic construct
RRWWTRASWPRRRRR

SEQ ID NO: 18041 - protein, 15 aa, synthetic construct
RRYQRGLPRSSIRGT

SEQ ID NO: 18042 - protein, 15 aa, synthetic construct
RSACSSCRRCSLSRA

SEQ ID NO: 18043 - protein, 15 aa, synthetic construct
RSACTWAAAAGASCA

SEQ ID NO: 18044 - protein, 15 aa, synthetic construct
RSAGAGTTTRTRPPS

SEQ ID NO: 18045 - protein, 15 aa, synthetic construct
RSAPPDGAAEPQDAQ

SEQ ID NO: 18046 - protein, 15 aa, synthetic construct
RSAWSENSGTCRPTT

SEQ ID NO: 18047 - protein, 15 aa, synthetic construct
RSCFPGQARTGASSC

SEQ ID NO: 18048 - protein, 15 aa, synthetic construct
RSCMPWAVFRASEAK

SEQ ID NO: 18049 - protein, 15 aa, synthetic construct
RSCSSSSTARLVSRA

SEQ ID NO: 18050 - protein, 15 aa, synthetic construct
RSCTAKSPPGGTANS

SEQ ID NO: 18051 - protein, 15 aa, synthetic construct
RSCTWTWTPTGSRSA

SEQ ID NO: 18052 - protein, 15 aa, synthetic construct
RSDAPARLGLRPGGR

SEQ ID NO: 18053 - protein, 15 aa, synthetic construct
RSDPEPGPQAPRGRE

SEQ ID NO: 18054 - protein, 15 aa, synthetic construct
RSEATTMSQQGKPAM

SEQ ID NO: 18055 - protein, 15 aa, synthetic construct
RSFCPPRGPRPGARR

SEQ ID NO: 18056 - protein, 15 aa, synthetic construct
RSGARAGTAVGGRGD

SEQ ID NO: 18057 - protein, 15 aa, synthetic construct
RSGGSQRRRRRRRRG

SEQ ID NO: 18058 - protein, 15 aa, synthetic construct
RSGPPGAVEGVHQAA

SEQ ID NO: 18059 - protein, 15 aa, synthetic construct
RSGRKPGQRRRQLRR

SEQ ID NO: 18060 - protein, 15 aa, synthetic construct
RSGRPGRCPEGARGP

SEQ ID NO: 18061 - protein, 15 aa, synthetic construct
RSILRRPGRAEGRQE

SEQ ID NO: 18062 - protein, 15 aa, synthetic construct
RSKSRASGRLVKAAQ

SEQ ID NO: 18063 - protein, 15 aa, synthetic construct
RSLATGSSGARATCP

SEQ ID NO: 18064 - protein, 15 aa, synthetic construct
RSLPRPGDEELQLLL

SEQ ID NO: 18065 - protein, 15 aa, synthetic construct
RSLRLQVPEPADHSH

SEQ ID NO: 18066 - protein, 15 aa, synthetic construct
RSLVAAVGAAETAAE

SEQ ID NO: 18067 - protein, 15 aa, synthetic construct
RSNVSTPAGPQPLGS

SEQ ID NO: 18068 - protein, 15 aa, synthetic construct
RSPAGSSGKCWTAHR

SEQ ID NO: 18069 - protein, 15 aa, synthetic construct
RSPEEVRLLGRGLPR

SEQ ID NO: 18070 - protein, 15 aa, synthetic construct
RSPGCSSPPATGRGC

SEQ ID NO: 18071 - protein, 15 aa, synthetic construct
RSPGPRARPWPPPPR

SEQ ID NO: 18072 - protein, 15 aa, synthetic construct
RSPPGEARCFPYLLK

SEQ ID NO: 18073 - protein, 15 aa, synthetic construct
RSPPPRSPGRCSASA

SEQ ID NO: 18074 - protein, 15 aa, synthetic construct
RSQAADPEQQIREAE

SEQ ID NO: 18075 - protein, 15 aa, synthetic construct
RSQASRHPSSEEDMG

SEQ ID NO: 18076 - protein, 15 aa, synthetic construct
RSRCQSQTASAAASP

SEQ ID NO: 18077 - protein, 15 aa, synthetic construct
RSRGCWAASSAAGAA

SEQ ID NO: 18078 - protein, 15 aa, synthetic construct
RSRGDQLQASALRPP

SEQ ID NO: 18079 - protein, 15 aa, synthetic construct
RSRGPEGAPETKRNP

SEQ ID NO: 18080 - protein, 15 aa, synthetic construct
RSRKGRTSSSPGAPG

SEQ ID NO: 18081 - protein, 15 aa, synthetic construct
RSRKRHAAVGGGAPT

SEQ ID NO: 18082 - protein, 15 aa, synthetic construct
RSRPCRAPRCSWRSS

SEQ ID NO: 18083 - protein, 15 aa, synthetic construct
RSRPGGRLARLLLLS

SEQ ID NO: 18084 - protein, 15 aa, synthetic construct
RSRPGRRCCCRRALP

SEQ ID NO: 18085 - protein, 15 aa, synthetic construct
RSRPPPLLSFTRILG

SEQ ID NO: 18086 - protein, 15 aa, synthetic construct
RSRQSTPRGRPLASG

SEQ ID NO: 18087 - protein, 15 aa, synthetic construct
RSRRPRRRRRPARQP

SEQ ID NO: 18088 - protein, 15 aa, synthetic construct
RSRTTRAATAPPVPS

SEQ ID NO: 18089 - protein, 15 aa, synthetic construct
RSSAASMKTYKGCPS

SEQ ID NO: 18090 - protein, 15 aa, synthetic construct
RSSCPPSCRRRRLQS

SEQ ID NO: 18091 - protein, 15 aa, synthetic construct
RSSKTSTTKPCPPMS

SEQ ID NO: 18092 - protein, 15 aa, synthetic construct
RSSRATSSSPTAASG

SEQ ID NO: 18093 - protein, 15 aa, synthetic construct
RSSRTRTRTGIPTGS

SEQ ID NO: 18094 - protein, 15 aa, synthetic construct
RSSTPPGPAPWRCCG

SEQ ID NO: 18095 - protein, 15 aa, synthetic construct
RSSWQDCGLTPTANS

SEQ ID NO: 18096 - protein, 15 aa, synthetic construct
RSTAGPTRGPAQEAK

SEQ ID NO: 18097 - protein, 15 aa, synthetic construct
RSTCPAGGRRYAKGR

SEQ ID NO: 18098 - protein, 15 aa, synthetic construct
RSTRARPTARRLWRL

SEQ ID NO: 18099 - protein, 15 aa, synthetic construct
RSTSRRQFAAAAAAA

SEQ ID NO: 18100 - protein, 15 aa, synthetic construct
RSTTRPRKARTAGKR

SEQ ID NO: 18101 - protein, 15 aa, synthetic construct
RSVSSGPCCSFPGQC

SEQ ID NO: 18102 - protein, 15 aa, synthetic construct
RSWAATSASTRQRPW

SEQ ID NO: 18103 - protein, 15 aa, synthetic construct
RSWACSPGGWPNTPQ

SEQ ID NO: 18104 - protein, 15 aa, synthetic construct
RSWCPASPAAPLAPT

SEQ ID NO: 18105 - protein, 15 aa, synthetic construct
RSWGPTPAKPGASSG

SEQ ID NO: 18106 - protein, 15 aa, synthetic construct
RSWPRPRWPRPRPRT

SEQ ID NO: 18107 - protein, 15 aa, synthetic construct
RSWPRWRSESWPLSW

SEQ ID NO: 18108 - protein, 15 aa, synthetic construct
RTAAAGGGPEPALPP

SEQ ID NO: 18109 - protein, 15 aa, synthetic construct
RTAATEESSSSLSST

SEQ ID NO: 18110 - protein, 15 aa, synthetic construct
RTAMRTAPSPASSPT

SEQ ID NO: 18111 - protein, 15 aa, synthetic construct
RTCWRTWSPRAPPWR

SEQ ID NO: 18112 - protein, 15 aa, synthetic construct
RTGANRRARPSPGAA

SEQ ID NO: 18113 - protein, 15 aa, synthetic construct
RTGSSAPGSPLLLQR

SEQ ID NO: 18114 - protein, 15 aa, synthetic construct
RTHGVGFMSFSRVDL

SEQ ID NO: 18115 - protein, 15 aa, synthetic construct
RTKAPGRPLGGTPET

SEQ ID NO: 18116 - protein, 15 aa, synthetic construct
RTLGASPGVAGTRVR

SEQ ID NO: 18117 - protein, 15 aa, synthetic construct
RTPAAARAAAAAPGR

SEQ ID NO: 18118 - protein, 15 aa, synthetic construct
RTPGAGGVGEQAPPQ

SEQ ID NO: 18119 - protein, 15 aa, synthetic construct
RTPGSGPAPTAPASA

SEQ ID NO: 18120 - protein, 15 aa, synthetic construct
RTPMPTSSTTGCCGP

SEQ ID NO: 18121 - protein, 15 aa, synthetic construct
RTPPGAAAAPARGEP

SEQ ID NO: 18122 - protein, 15 aa, synthetic construct
RTPSSHDPDNALEDK

SEQ ID NO: 18123 - protein, 15 aa, synthetic construct
RTPTPSSRATRPSDP

SEQ ID NO: 18124 - protein, 15 aa, synthetic construct
RTQPLSPPTSGEGRG

SEQ ID NO: 18125 - protein, 15 aa, synthetic construct
RTRATGTRGDPGGAA

SEQ ID NO: 18126 - protein, 15 aa, synthetic construct
RTRGATSVATSSGAS

SEQ ID NO: 18127 - protein, 15 aa, synthetic construct
RTRGQDAVRADRVSA

SEQ ID NO: 18128 - protein, 15 aa, synthetic construct
RTRSRRTRGRAGAPA

SEQ ID NO: 18129 - protein, 15 aa, synthetic construct
RTRSSRRATRPSSRH

SEQ ID NO: 18130 - protein, 15 aa, synthetic construct
RTRTRTCTRGRPARG

SEQ ID NO: 18131 - protein, 15 aa, synthetic construct
RTTRPPHRSPCGPWA

SEQ ID NO: 18132 - protein, 15 aa, synthetic construct
RVANGPRGGASARQQ

SEQ ID NO: 18133 - protein, 15 aa, synthetic construct
RVARARMMAGRLGIS

SEQ ID NO: 18134 - protein, 15 aa, synthetic construct
RVCHPHRNSHKCIGE

SEQ ID NO: 18135 - protein, 15 aa, synthetic construct
RVDAVTMWKRRNGSA

SEQ ID NO: 18136 - protein, 15 aa, synthetic construct
RVEAPPAQSPGRAEA

SEQ ID NO: 18137 - protein, 15 aa, synthetic construct
RVEFQQPRLRGRGAP

SEQ ID NO: 18138 - protein, 15 aa, synthetic construct
RVGARERCACRRPNS

SEQ ID NO: 18139 - protein, 15 aa, synthetic construct
RVGPSVPGRAADSAT

SEQ ID NO: 18140 - protein, 15 aa, synthetic construct
RVGSRGEPAAARTAA

SEQ ID NO: 18141 - protein, 15 aa, synthetic construct
RVGTEAAPVRTAKPA

SEQ ID NO: 18142 - protein, 15 aa, synthetic construct
RVHREGASAGDAEPR

SEQ ID NO: 18143 - protein, 15 aa, synthetic construct
RVIAQVDGSSQFAAV

SEQ ID NO: 18144 - protein, 15 aa, synthetic construct
RVLAGARGGLRPQEG

SEQ ID NO: 18145 - protein, 15 aa, synthetic construct
RVPAPACPQPADATP

SEQ ID NO: 18146 - protein, 15 aa, synthetic construct
RVPEHSAAPGAGAET

SEQ ID NO: 18147 - protein, 15 aa, synthetic construct
RVPGGERAVPAALRG

SEQ ID NO: 18148 - protein, 15 aa, synthetic construct
RVPGLGAALRGHLHT

SEQ ID NO: 18149 - protein, 15 aa, synthetic construct
RVPGPAGTGTASECQ

SEQ ID NO: 18150 - protein, 15 aa, synthetic construct
RVPGRPVPAQPAAGE

SEQ ID NO: 18151 - protein, 15 aa, synthetic construct
RVPIALPGRTSGTFP

SEQ ID NO: 18152 - protein, 15 aa, synthetic construct
RVPLACAGGRRLREQ

SEQ ID NO: 18153 - protein, 15 aa, synthetic construct
RVPLPDPGVRAHADP

SEQ ID NO: 18154 - protein, 15 aa, synthetic construct
RVPQPAQPQPVGGRP

SEQ ID NO: 18155 - protein, 15 aa, synthetic construct
RVPQSRHPACQKDME

SEQ ID NO: 18156 - protein, 15 aa, synthetic construct
RVPRGPDPRSHSSLP

SEQ ID NO: 18157 - protein, 15 aa, synthetic construct
RVPRPQLQQLDPAGR

SEQ ID NO: 18158 - protein, 15 aa, synthetic construct
RVPRQAREGAAVHGQ

SEQ ID NO: 18159 - protein, 15 aa, synthetic construct
RVQGGDQDLLPRGDI

SEQ ID NO: 18160 - protein, 15 aa, synthetic construct
RVQIQLQGAAPGAER

SEQ ID NO: 18161 - protein, 15 aa, synthetic construct
RVQPHARSSLCTSTS

SEQ ID NO: 18162 - protein, 15 aa, synthetic construct
RVRGGGRGRADPAAG

SEQ ID NO: 18163 - protein, 15 aa, synthetic construct
RVRGSAARRKPGAPG

SEQ ID NO: 18164 - protein, 15 aa, synthetic construct
RVRPDGPVGLLRGPA

SEQ ID NO: 18165 - protein, 15 aa, synthetic construct
RVRRPRAAPGRSAGS

SEQ ID NO: 18166 - protein, 15 aa, synthetic construct
RVRWAGRPLKGCSAG

SEQ ID NO: 18167 - protein, 15 aa, synthetic construct
RVSKSGKNRPGMPGP

SEQ ID NO: 18168 - protein, 15 aa, synthetic construct
RVVLPTRLGEAAAVP

SEQ ID NO: 18169 - protein, 15 aa, synthetic construct
RVVQARGESPLPHGG

SEQ ID NO: 18170 - protein, 15 aa, synthetic construct
RVVQPRAALAGRDAR

SEQ ID NO: 18171 - protein, 15 aa, synthetic construct
RWAQGMHRPGGVVQA

SEQ ID NO: 18172 - protein, 15 aa, synthetic construct
RWASAAATTTARRCW

SEQ ID NO: 18173 - protein, 15 aa, synthetic construct
RWGGRGGGPGGRRGL

SEQ ID NO: 18174 - protein, 15 aa, synthetic construct
RWGRRGRGRRGQRGR

SEQ ID NO: 18175 - protein, 15 aa, synthetic construct
RWIQRPAEEPGAGRE

SEQ ID NO: 18176 - protein, 15 aa, synthetic construct
RWPQRRRAEAGSGKW

SEQ ID NO: 18177 - protein, 15 aa, synthetic construct
RWPVSASAVEPAGDA

SEQ ID NO: 18178 - protein, 15 aa, synthetic construct
RWQPGRAVPPEPPAQ

SEQ ID NO: 18179 - protein, 15 aa, synthetic construct
RWQPSCLNGEGAATV

SEQ ID NO: 18180 - protein, 15 aa, synthetic construct
RWQRLGSPRGGGGFS

SEQ ID NO: 18181 - protein, 15 aa, synthetic construct
RWRRAAGPAARASPT

SEQ ID NO: 18182 - protein, 15 aa, synthetic construct
RWRRGPRARPFPERP

SEQ ID NO: 18183 - protein, 15 aa, synthetic construct
RWRRRGRRGPGTDPG

SEQ ID NO: 18184 - protein, 15 aa, synthetic construct
RWSRAPLEERLPGRG

SEQ ID NO: 18185 - protein, 15 aa, synthetic construct
RYCGPRPEPQRAPAP

SEQ ID NO: 18186 - protein, 15 aa, synthetic construct
RYRRAPTLPTAPARA

SEQ ID NO: 18187 - protein, 15 aa, synthetic construct
SAAAAAAVGRHPGRP

SEQ ID NO: 18188 - protein, 15 aa, synthetic construct
SAAAPSAAAAAAAAA

SEQ ID NO: 18189 - protein, 15 aa, synthetic construct
SAAARLPRARRRLPW

SEQ ID NO: 18190 - protein, 15 aa, synthetic construct
SAAARRAILSMCTRF

SEQ ID NO: 18191 - protein, 15 aa, synthetic construct
SAAARRAILSTCTRC

SEQ ID NO: 18192 - protein, 15 aa, synthetic construct
SAAARRATPFTCTRC

SEQ ID NO: 18193 - protein, 15 aa, synthetic construct
SAAASPCAAVCQPVP

SEQ ID NO: 18194 - protein, 15 aa, synthetic construct
SAALPAAFGTLHAGV

SEQ ID NO: 18195 - protein, 15 aa, synthetic construct
SAAPAAATASRAGGA

SEQ ID NO: 18196 - protein, 15 aa, synthetic construct
SAAPAACCRPAGRGG

SEQ ID NO: 18197 - protein, 15 aa, synthetic construct
SAARSGGRCSARSSP

SEQ ID NO: 18198 - protein, 15 aa, synthetic construct
SAASRRPTPGPAAAA

SEQ ID NO: 18199 - protein, 15 aa, synthetic construct
SAATTTTTTTTRSES

SEQ ID NO: 18200 - protein, 15 aa, synthetic construct
SAAVRGPGPGQWAEA

SEQ ID NO: 18201 - protein, 15 aa, synthetic construct
SACGRVGRRPGRGRG

SEQ ID NO: 18202 - protein, 15 aa, synthetic construct
SADRGAGELPRGGGS

SEQ ID NO: 18203 - protein, 15 aa, synthetic construct
SAEARPLPSLRLDPL

SEQ ID NO: 18204 - protein, 15 aa, synthetic construct
SAEEALRGSTAAAEG

SEQ ID NO: 18205 - protein, 15 aa, synthetic construct
SAEGGLHCVRPPRSE

SEQ ID NO: 18206 - protein, 15 aa, synthetic construct
SAEPDRAEEPSWTGR

SEQ ID NO: 18207 - protein, 15 aa, synthetic construct
SAEPTNGAGSTWAGP

SEQ ID NO: 18208 - protein, 15 aa, synthetic construct
SAERPRVLPASARVA

SEQ ID NO: 18209 - protein, 15 aa, synthetic construct
SAESAGPRLAARSLH

SEQ ID NO: 18210 - protein, 15 aa, synthetic construct
SAESASSPEVGRSFS

SEQ ID NO: 18211 - protein, 15 aa, synthetic construct
SAFCPLPRRSLGFSE

SEQ ID NO: 18212 - protein, 15 aa, synthetic construct
SAGAEEPGKLSVPEN

SEQ ID NO: 18213 - protein, 15 aa, synthetic construct
SAGGKYCCGCWDFPS

SEQ ID NO: 18214 - protein, 15 aa, synthetic construct
SAGGPGPGRRLGPES

SEQ ID NO: 18215 - protein, 15 aa, synthetic construct
SAGTPSMAPARSRLQ

SEQ ID NO: 18216 - protein, 15 aa, synthetic construct
SAHRAGPRPGAGAET

SEQ ID NO: 18217 - protein, 15 aa, synthetic construct
SAHVFGAAARDGWRN

SEQ ID NO: 18218 - protein, 15 aa, synthetic construct
SAIPDSLLYGVAPVL

SEQ ID NO: 18219 - protein, 15 aa, synthetic construct
SALDLHPGGPGGGDR

SEQ ID NO: 18220 - protein, 15 aa, synthetic construct
SALPAGSAAAGAALR

SEQ ID NO: 18221 - protein, 15 aa, synthetic construct
SALSLGSVPLPAFLP

SEQ ID NO: 18222 - protein, 15 aa, synthetic construct
SAMETSGGDGRVLPG

SEQ ID NO: 18223 - protein, 15 aa, synthetic construct
SAMGTARWSCPGRSL

SEQ ID NO: 18224 - protein, 15 aa, synthetic construct
SAPGGLPGPGQGAGG

SEQ ID NO: 18225 - protein, 15 aa, synthetic construct
SAPITCTWRAMGCTC

SEQ ID NO: 18226 - protein, 15 aa, synthetic construct
SAPLGSSSWSLWRRL

SEQ ID NO: 18227 - protein, 15 aa, synthetic construct
SAQAAGHQGGSEERS

SEQ ID NO: 18228 - protein, 15 aa, synthetic construct
SAQGTRNQAWRNPES

SEQ ID NO: 18229 - protein, 15 aa, synthetic construct
SAQVAPGPAAPSAAE

SEQ ID NO: 18230 - protein, 15 aa, synthetic construct
SARCGAAAATAASSS

SEQ ID NO: 18231 - protein, 15 aa, synthetic construct
SARCRWGPPRRRRRR

SEQ ID NO: 18232 - protein, 15 aa, synthetic construct
SARPSAGNSTSTPSP

SEQ ID NO: 18233 - protein, 15 aa, synthetic construct
SARSSNPAGKSSRTP

SEQ ID NO: 18234 - protein, 15 aa, synthetic construct
SASARGCWRPSWLRS

SEQ ID NO: 18235 - protein, 15 aa, synthetic construct
SASATQPTSSGSSSA

SEQ ID NO: 18236 - protein, 15 aa, synthetic construct
SASCGPLHICLSQGP

SEQ ID NO: 18237 - protein, 15 aa, synthetic construct
SASGVCDPSEWNFLE

SEQ ID NO: 18238 - protein, 15 aa, synthetic construct
SASKRRHRGKPPQCP

SEQ ID NO: 18239 - protein, 15 aa, synthetic construct
SASPSRPSRATSPTG

SEQ ID NO: 18240 - protein, 15 aa, synthetic construct
SASRSSPPITIQTSS

SEQ ID NO: 18241 - protein, 15 aa, synthetic construct
SASSARPTSSSGPKP

SEQ ID NO: 18242 - protein, 15 aa, synthetic construct
SASSCDRPALRAPGR

SEQ ID NO: 18243 - protein, 15 aa, synthetic construct
SATCGSSSGVSPASR

SEQ ID NO: 18244 - protein, 15 aa, synthetic construct
SATGDRGFSVLPQCS

SEQ ID NO: 18245 - protein, 15 aa, synthetic construct
SATPSPRRPNTAPSW

SEQ ID NO: 18246 - protein, 15 aa, synthetic construct
SATPVPMPRPPPPRL

SEQ ID NO: 18247 - protein, 15 aa, synthetic construct
SAVGGGLPSPGEGES

SEQ ID NO: 18248 - protein, 15 aa, synthetic construct
SAVTPAPHPAASLIP

SEQ ID NO: 18249 - protein, 15 aa, synthetic construct
SAWASWPGPRTPSPA

SEQ ID NO: 18250 - protein, 15 aa, synthetic construct
SCESSATTAPAAAAT

SEQ ID NO: 18251 - protein, 15 aa, synthetic construct
SCGFGELTGGGELLC

SEQ ID NO: 18252 - protein, 15 aa, synthetic construct
SCGISAASTPGPGSA

SEQ ID NO: 18253 - protein, 15 aa, synthetic construct
SCGPRIAAGLGLPWL

SEQ ID NO: 18254 - protein, 15 aa, synthetic construct
SCGPVNGPERLPTGG

SEQ ID NO: 18255 - protein, 15 aa, synthetic construct
SCIFTENDGVDSAPA

SEQ ID NO: 18256 - protein, 15 aa, synthetic construct
SCLFSPRPLQPTMTS

SEQ ID NO: 18257 - protein, 15 aa, synthetic construct
SCPTSTPPSSCRPSC

SEQ ID NO: 18258 - protein, 15 aa, synthetic construct
SCQPPPPRPCLPPTS

SEQ ID NO: 18259 - protein, 15 aa, synthetic construct
SCRASSAPCGTCSSS

SEQ ID NO: 18260 - protein, 15 aa, synthetic construct
SCRRGAGAAVAATAP

SEQ ID NO: 18261 - protein, 15 aa, synthetic construct
SCSGPTMPTSLNSAW

SEQ ID NO: 18262 - protein, 15 aa, synthetic construct
SCSPAAAGPGPGGSR

SEQ ID NO: 18263 - protein, 15 aa, synthetic construct
SCSRHPGCAPGPSGC

SEQ ID NO: 18264 - protein, 15 aa, synthetic construct
SCTPALGTQCPPALI

SEQ ID NO: 18265 - protein, 15 aa, synthetic construct
SCTQAPPETRRERRA

SEQ ID NO: 18266 - protein, 15 aa, synthetic construct
SCTVKPLPPRPPLLR

SEQ ID NO: 18267 - protein, 15 aa, synthetic construct
SDERGGDGGVCDGRQ

SEQ ID NO: 18268 - protein, 15 aa, synthetic construct
SDGATASSTTSSTTK

SEQ ID NO: 18269 - protein, 15 aa, synthetic construct
SDGTGSFKSMSTSTE

SEQ ID NO: 18270 - protein, 15 aa, synthetic construct
SDIDGAELPTGFGWG

SEQ ID NO: 18271 - protein, 15 aa, synthetic construct
SDPRERAGAPEPSAA

SEQ ID NO: 18272 - protein, 15 aa, synthetic construct
SDPVSRCSTSGLCAS

SEQ ID NO: 18273 - protein, 15 aa, synthetic construct
SDQEREQAQAQPTPR

SEQ ID NO: 18274 - protein, 15 aa, synthetic construct
SDRGPRTEVNPFQPV

SEQ ID NO: 18275 - protein, 15 aa, synthetic construct
SDSEPPGDRGKWQSR

SEQ ID NO: 18276 - protein, 15 aa, synthetic construct
SDSGLGSSPSPCPGP

SEQ ID NO: 18277 - protein, 15 aa, synthetic construct
SDSRAGPSCAIEPPD

SEQ ID NO: 18278 - protein, 15 aa, synthetic construct
SDSTSAAPTSSPLGR

SEQ ID NO: 18279 - protein, 15 aa, synthetic construct
SDSVSRYSALGLCAD

SEQ ID NO: 18280 - protein, 15 aa, synthetic construct
SDTDGAELPTGFGWG

SEQ ID NO: 18281 - protein, 15 aa, synthetic construct
SDTDGAELPTGFRWG

SEQ ID NO: 18282 - protein, 15 aa, synthetic construct
SDTDGAELPTGFVWG

SEQ ID NO: 18283 - protein, 15 aa, synthetic construct
SDTLPSAWISAMGIP

SEQ ID NO: 18284 - protein, 15 aa, synthetic construct
SEAAAGGSPAPTMPG

SEQ ID NO: 18285 - protein, 15 aa, synthetic construct
SEAEAEARNEAGLES

SEQ ID NO: 18286 - protein, 15 aa, synthetic construct
SEALWGGGGDGLENG

SEQ ID NO: 18287 - protein, 15 aa, synthetic construct
SEGAHALGAQETEGA

SEQ ID NO: 18288 - protein, 15 aa, synthetic construct
SEGPRSPLGKSDEAV

SEQ ID NO: 18289 - protein, 15 aa, synthetic construct
SEIGSGSLRRRAPGA

SEQ ID NO: 18290 - protein, 15 aa, synthetic construct
SEKATQLLGEPTIPA

SEQ ID NO: 18291 - protein, 15 aa, synthetic construct
SELGPAAPPAAAGEC

SEQ ID NO: 18292 - protein, 15 aa, synthetic construct
SELRLRRPRIRNAGQ

SEQ ID NO: 18293 - protein, 15 aa, synthetic construct
SEPMGAASAATIGSA

SEQ ID NO: 18294 - protein, 15 aa, synthetic construct
SERCATWKRRCAATG

SEQ ID NO: 18295 - protein, 15 aa, synthetic construct
SEREDPGGWRGLKRG

SEQ ID NO: 18296 - protein, 15 aa, synthetic construct
SESLSRGAAPVASSG

SEQ ID NO: 18297 - protein, 15 aa, synthetic construct
SFAGCTHVAMRDISE

SEQ ID NO: 18298 - protein, 15 aa, synthetic construct
SFGYPGAAPAAGPAG

SEQ ID NO: 18299 - protein, 15 aa, synthetic construct
SFHSGDRALGEENSL

SEQ ID NO: 18300 - protein, 15 aa, synthetic construct
SFHSGDRAVGEGSSL

SEQ ID NO: 18301 - protein, 15 aa, synthetic construct
SFHSGGRALEEGGSR

SEQ ID NO: 18302 - protein, 15 aa, synthetic construct
SFLRRCQTAPSAPGN

SEQ ID NO: 18303 - protein, 15 aa, synthetic construct
SFMKSPKPITNSKVN

SEQ ID NO: 18304 - protein, 15 aa, synthetic construct
SFPRGGRAGRQAPRK

SEQ ID NO: 18305 - protein, 15 aa, synthetic construct
SFQSGDRALGEENSL

SEQ ID NO: 18306 - protein, 15 aa, synthetic construct
SGACPSPEVAPDAGG

SEQ ID NO: 18307 - protein, 15 aa, synthetic construct
SGAGPLRAPGSIAAP

SEQ ID NO: 18308 - protein, 15 aa, synthetic construct
SGALPGRARPQALQD

SEQ ID NO: 18309 - protein, 15 aa, synthetic construct
SGAPAGPPAPRAAAG

SEQ ID NO: 18310 - protein, 15 aa, synthetic construct
SGAPVPLVSRQTPPP

SEQ ID NO: 18311 - protein, 15 aa, synthetic construct
SGASRPGPPAHRSPP

SEQ ID NO: 18312 - protein, 15 aa, synthetic construct
SGCDGGRGGSGVGLP

SEQ ID NO: 18313 - protein, 15 aa, synthetic construct
SGCHGCCLLIFGTPG

SEQ ID NO: 18314 - protein, 15 aa, synthetic construct
SGDAERGHAGAAGWG

SEQ ID NO: 18315 - protein, 15 aa, synthetic construct
SGDPEVFWRGDQKGR

SEQ ID NO: 18316 - protein, 15 aa, synthetic construct
SGEAAAGAAPQALPL

SEQ ID NO: 18317 - protein, 15 aa, synthetic construct
SGEAPSPETGTRHKE

SEQ ID NO: 18318 - protein, 15 aa, synthetic construct
SGECDCRARGRGPGQ

SEQ ID NO: 18319 - protein, 15 aa, synthetic construct
SGEPGGSHGRDRWGA

SEQ ID NO: 18320 - protein, 15 aa, synthetic construct
SGERSPRRGPQPLQP

SEQ ID NO: 18321 - protein, 15 aa, synthetic construct
SGESPPRQKRTSLMD

SEQ ID NO: 18322 - protein, 15 aa, synthetic construct
SGFHTAAAAAGCNGE

SEQ ID NO: 18323 - protein, 15 aa, synthetic construct
SGFSLPTGRQGAASS

SEQ ID NO: 18324 - protein, 15 aa, synthetic construct
SGGAGGWGRPATRMA

SEQ ID NO: 18325 - protein, 15 aa, synthetic construct
SGGCTGGCGGCPRRN

SEQ ID NO: 18326 - protein, 15 aa, synthetic construct
SGGGGERGRRSGRGG

SEQ ID NO: 18327 - protein, 15 aa, synthetic construct
SGGGGGGGRRRTTNP

SEQ ID NO: 18328 - protein, 15 aa, synthetic construct
SGGGHAQHRGGGGEA

SEQ ID NO: 18329 - protein, 15 aa, synthetic construct
SGGGQPPATATQTRA

SEQ ID NO: 18330 - protein, 15 aa, synthetic construct
SGGNRGGAAAPALPA

SEQ ID NO: 18331 - protein, 15 aa, synthetic construct
SGGPGCPQAREHKAA

SEQ ID NO: 18332 - protein, 15 aa, synthetic construct
SGGREVWTSQESRSQ

SEQ ID NO: 18333 - protein, 15 aa, synthetic construct
SGGRGGSGGRGGPGG

SEQ ID NO: 18334 - protein, 15 aa, synthetic construct
SGGSEEEGPSTRAEL

SEQ ID NO: 18335 - protein, 15 aa, synthetic construct
SGHRQLEDQAHPGRD

SEQ ID NO: 18336 - protein, 15 aa, synthetic construct
SGKWRVAGGRPGPSA

SEQ ID NO: 18337 - protein, 15 aa, synthetic construct
SGLRAGGERGAGGEE

SEQ ID NO: 18338 - protein, 15 aa, synthetic construct
SGLSASTTPRAAPAS

SEQ ID NO: 18339 - protein, 15 aa, synthetic construct
SGPGESPARVLLQLL

SEQ ID NO: 18340 - protein, 15 aa, synthetic construct
SGPGFDALFQGQGQG

SEQ ID NO: 18341 - protein, 15 aa, synthetic construct
SGPGPPRPPRPPRPL

SEQ ID NO: 18342 - protein, 15 aa, synthetic construct
SGPGSCCRCCCCCCP

SEQ ID NO: 18343 - protein, 15 aa, synthetic construct
SGPRVQPQPPSCPVV

SEQ ID NO: 18344 - protein, 15 aa, synthetic construct
SGPSRSPRPPRPPRP

SEQ ID NO: 18345 - protein, 15 aa, synthetic construct
SGQGPAVLPAHHEPR

SEQ ID NO: 18346 - protein, 15 aa, synthetic construct
SGRASEPRAPLPRRD

SEQ ID NO: 18347 - protein, 15 aa, synthetic construct
SGRAWVSGRGGRTAA

SEQ ID NO: 18348 - protein, 15 aa, synthetic construct
SGRETFREPESLHRR

SEQ ID NO: 18349 - protein, 15 aa, synthetic construct
SGRGHGRGGGGGGGG

SEQ ID NO: 18350 - protein, 15 aa, synthetic construct
SGRGSPRCGSGGAPR

SEQ ID NO: 18351 - protein, 15 aa, synthetic construct
SGRLAGRPGPRAAPG

SEQ ID NO: 18352 - protein, 15 aa, synthetic construct
SGRLARRRCGRRRLR

SEQ ID NO: 18353 - protein, 15 aa, synthetic construct
SGRPAPGPEVPRKEQ

SEQ ID NO: 18354 - protein, 15 aa, synthetic construct
SGRPDVPPERDARAA

SEQ ID NO: 18355 - protein, 15 aa, synthetic construct
SGRREGHRPVLRPPP

SEQ ID NO: 18356 - protein, 15 aa, synthetic construct
SGRRRGGPRGRRLPP

SEQ ID NO: 18357 - protein, 15 aa, synthetic construct
SGRRRTSAGCGRRSS

SEQ ID NO: 18358 - protein, 15 aa, synthetic construct
SGRTPGAGPGPGAGA

SEQ ID NO: 18359 - protein, 15 aa, synthetic construct
SGRYGEPDARVPSPR

SEQ ID NO: 18360 - protein, 15 aa, synthetic construct
SGSPRDSPLPEVHRA

SEQ ID NO: 18361 - protein, 15 aa, synthetic construct
SGSSRTWPGTLAASS

SEQ ID NO: 18362 - protein, 15 aa, synthetic construct
SGTRDGAPTQTKAAP

SEQ ID NO: 18363 - protein, 15 aa, synthetic construct
SGVGKMAHSKAPRGG

SEQ ID NO: 18364 - protein, 15 aa, synthetic construct
SGVRSGRVDASAIAG

SEQ ID NO: 18365 - protein, 15 aa, synthetic construct
SHAARAELPAAGLPR

SEQ ID NO: 18366 - protein, 15 aa, synthetic construct
SHAEAGGDPAEPQLP

SEQ ID NO: 18367 - protein, 15 aa, synthetic construct
SHGGRGEHGSADGLG

SEQ ID NO: 18368 - protein, 15 aa, synthetic construct
SHGMSATPRRPSISS

SEQ ID NO: 18369 - protein, 15 aa, synthetic construct
SHRPGPAGLAEKAAG

SEQ ID NO: 18370 - protein, 15 aa, synthetic construct
SHSCAPTSSTCGSMT

SEQ ID NO: 18371 - protein, 15 aa, synthetic construct
SIAGPRARGQSRGAA

SEQ ID NO: 18372 - protein, 15 aa, synthetic construct
SIGPQTAREPGNLPN

SEQ ID NO: 18373 - protein, 15 aa, synthetic construct
SIPAAGAGERRGGLG

SEQ ID NO: 18374 - protein, 15 aa, synthetic construct
SIPSSCSLLHEKDPP

SEQ ID NO: 18375 - protein, 15 aa, synthetic construct
SIRSAGRQKYLFKCH

SEQ ID NO: 18376 - protein, 15 aa, synthetic construct
SKEGFPPQNNSDQII

SEQ ID NO: 18377 - protein, 15 aa, synthetic construct
SKGRQYGLPSPNSSF

SEQ ID NO: 18378 - protein, 15 aa, synthetic construct
SKILIQYLNWEQNNN

SEQ ID NO: 18379 - protein, 15 aa, synthetic construct
SKVARMAGPQPSAAL

SEQ ID NO: 18380 - protein, 15 aa, synthetic construct
SKWRKRAARPACRAA

SEQ ID NO: 18381 - protein, 15 aa, synthetic construct
SLAASPQPGGPGGAR

SEQ ID NO: 18382 - protein, 15 aa, synthetic construct
SLALPATAAGGAERP

SEQ ID NO: 18383 - protein, 15 aa, synthetic construct
SLEARAAPPVPAPAA

SEQ ID NO: 18384 - protein, 15 aa, synthetic construct
SLEKRLPAAREGAAG

SEQ ID NO: 18385 - protein, 15 aa, synthetic construct
SLERSAAAAMRGCSG

SEQ ID NO: 18386 - protein, 15 aa, synthetic construct
SLHPPARPAPARSPG

SEQ ID NO: 18387 - protein, 15 aa, synthetic construct
SLLALFEDSATGAQP

SEQ ID NO: 18388 - protein, 15 aa, synthetic construct
SLLRPSRPGPSRRRN

SEQ ID NO: 18389 - protein, 15 aa, synthetic construct
SLLVQGGAAGGRLRG

SEQ ID NO: 18390 - protein, 15 aa, synthetic construct
SLPCSGGPGVAGVQE

SEQ ID NO: 18391 - protein, 15 aa, synthetic construct
SLPEVATAASAAPER

SEQ ID NO: 18392 - protein, 15 aa, synthetic construct
SLPLGAPVPGPGQGS

SEQ ID NO: 18393 - protein, 15 aa, synthetic construct
SLPPHQGLTFSNKIQ

SEQ ID NO: 18394 - protein, 15 aa, synthetic construct
SLQEIDGDRLADLPL

SEQ ID NO: 18395 - protein, 15 aa, synthetic construct
SLQLRLIFMRKKLLY

SEQ ID NO: 18396 - protein, 15 aa, synthetic construct
SLQNSVQGGKQLTGL

SEQ ID NO: 18397 - protein, 15 aa, synthetic construct
SLRARRLGSPEPEPP

SEQ ID NO: 18398 - protein, 15 aa, synthetic construct
SLSAALPGGDPRPRN

SEQ ID NO: 18399 - protein, 15 aa, synthetic construct
SLSPAGSGAAVQPGP

SEQ ID NO: 18400 - protein, 15 aa, synthetic construct
SLSVSTQTGNPRGPS

SEQ ID NO: 18401 - protein, 15 aa, synthetic construct
SLTQVSPKEPSTVSA

SEQ ID NO: 18402 - protein, 15 aa, synthetic construct
SMPWTGMGTVSSASR

SEQ ID NO: 18403 - protein, 15 aa, synthetic construct
SNADPAHDVDDSCSP

SEQ ID NO: 18404 - protein, 15 aa, synthetic construct
SPAAAAAAATAAAAG

SEQ ID NO: 18405 - protein, 15 aa, synthetic construct
SPAAANPAVPSPAVV

SEQ ID NO: 18406 - protein, 15 aa, synthetic construct
SPAAAPAAAARGRRG

SEQ ID NO: 18407 - protein, 15 aa, synthetic construct
SPAAASPAVPRPAAV

SEQ ID NO: 18408 - protein, 15 aa, synthetic construct
SPAAPAPCAVPPLAA

SEQ ID NO: 18409 - protein, 15 aa, synthetic construct
SPAARTARAGASRWS

SEQ ID NO: 18410 - protein, 15 aa, synthetic construct
SPAATGPSAASPPAA

SEQ ID NO: 18411 - protein, 15 aa, synthetic construct
SPAAVAPAAVCPAAA

SEQ ID NO: 18412 - protein, 15 aa, synthetic construct
SPAGAADFGVSWGGR

SEQ ID NO: 18413 - protein, 15 aa, synthetic construct
SPAHAGPRAAPVQPA

SEQ ID NO: 18414 - protein, 15 aa, synthetic construct
SPAPCSPSSSWPGSC

SEQ ID NO: 18415 - protein, 15 aa, synthetic construct
SPAPRAQFQRPPGAP

SEQ ID NO: 18416 - protein, 15 aa, synthetic construct
SPAQRSLPCARLPGK

SEQ ID NO: 18417 - protein, 15 aa, synthetic construct
SPARAQPLSGRGVAG

SEQ ID NO: 18418 - protein, 15 aa, synthetic construct
SPASALPRPPRLSGS

SEQ ID NO: 18419 - protein, 15 aa, synthetic construct
SPASQEAADGWLLCS

SEQ ID NO: 18420 - protein, 15 aa, synthetic construct
SPASQEAANGWLLCS

SEQ ID NO: 18421 - protein, 15 aa, synthetic construct
SPASRATWKATWTSA

SEQ ID NO: 18422 - protein, 15 aa, synthetic construct
SPATAPCAATHLPTA

SEQ ID NO: 18423 - protein, 15 aa, synthetic construct
SPATSGRARAPGRAA

SEQ ID NO: 18424 - protein, 15 aa, synthetic construct
SPCDVHGPAAEPDGP

SEQ ID NO: 18425 - protein, 15 aa, synthetic construct
SPDADRDCCSHGPVS

SEQ ID NO: 18426 - protein, 15 aa, synthetic construct
SPDCSQPSTSHPHVL

SEQ ID NO: 18427 - protein, 15 aa, synthetic construct
SPDLLRPRLPGLPLP

SEQ ID NO: 18428 - protein, 15 aa, synthetic construct
SPEPREARGARGARG

SEQ ID NO: 18429 - protein, 15 aa, synthetic construct
SPEQQEEAGQPFPQW

SEQ ID NO: 18430 - protein, 15 aa, synthetic construct
SPERPPSTRRPQQSP

SEQ ID NO: 18431 - protein, 15 aa, synthetic construct
SPFAASAKSEALTLD

SEQ ID NO: 18432 - protein, 15 aa, synthetic construct
SPGCCAAAPCCPRPR

SEQ ID NO: 18433 - protein, 15 aa, synthetic construct
SPGLFDLHSQQRGQD

SEQ ID NO: 18434 - protein, 15 aa, synthetic construct
SPGPRGYPGPRRRAA

SEQ ID NO: 18435 - protein, 15 aa, synthetic construct
SPGPSPGCHGQHGGG

SEQ ID NO: 18436 - protein, 15 aa, synthetic construct
SPGRRPSRRSPPSAT

SEQ ID NO: 18437 - protein, 15 aa, synthetic construct
SPGRSRAGSGRGCSC

SEQ ID NO: 18438 - protein, 15 aa, synthetic construct
SPGRVPRRRAARGAA

SEQ ID NO: 18439 - protein, 15 aa, synthetic construct
SPHARAARPEPPDRR

SEQ ID NO: 18440 - protein, 15 aa, synthetic construct
SPHDASLHRGASGRA

SEQ ID NO: 18441 - protein, 15 aa, synthetic construct
SPHLPGHPAPHPHVL

SEQ ID NO: 18442 - protein, 15 aa, synthetic construct
SPHLPGHPAPHPHVP

SEQ ID NO: 18443 - protein, 15 aa, synthetic construct
SPKRRQHHQRQPPEP

SEQ ID NO: 18444 - protein, 15 aa, synthetic construct
SPLGPRPPRVSGEPR

SEQ ID NO: 18445 - protein, 15 aa, synthetic construct
SPLLPPTPLTSPPLL

SEQ ID NO: 18446 - protein, 15 aa, synthetic construct
SPLPSPSAWASALTS

SEQ ID NO: 18447 - protein, 15 aa, synthetic construct
SPLRPRGASRGHATA

SEQ ID NO: 18448 - protein, 15 aa, synthetic construct
SPLSRSRPSWRGPTP

SEQ ID NO: 18449 - protein, 15 aa, synthetic construct
SPMASGLSPLPPHQG

SEQ ID NO: 18450 - protein, 15 aa, synthetic construct
SPNGPSSTRGASGSS

SEQ ID NO: 18451 - protein, 15 aa, synthetic construct
SPPAAAPAAAAPAAA

SEQ ID NO: 18452 - protein, 15 aa, synthetic construct
SPPALRGAMTLGGCG

SEQ ID NO: 18453 - protein, 15 aa, synthetic construct
SPPASGGSNRNRNSS

SEQ ID NO: 18454 - protein, 15 aa, synthetic construct
SPPAVAPAAVCPAAA

SEQ ID NO: 18455 - protein, 15 aa, synthetic construct
SPPEAALTAAAPNPP

SEQ ID NO: 18456 - protein, 15 aa, synthetic construct
SPPENGWPRPSAFRS

SEQ ID NO: 18457 - protein, 15 aa, synthetic construct
SPPPSSASSRSFPHS

SEQ ID NO: 18458 - protein, 15 aa, synthetic construct
SPPPTGAWRWPPSRT

SEQ ID NO: 18459 - protein, 15 aa, synthetic construct
SPQPCSAKAAERASS

SEQ ID NO: 18460 - protein, 15 aa, synthetic construct
SPQSGTAPASPALTK

SEQ ID NO: 18461 - protein, 15 aa, synthetic construct
SPRAHGPPMLAHPAA

SEQ ID NO: 18462 - protein, 15 aa, synthetic construct
SPRGRGERGGGSSGG

SEQ ID NO: 18463 - protein, 15 aa, synthetic construct
SPRLAGPERAGAPAA

SEQ ID NO: 18464 - protein, 15 aa, synthetic construct
SPRPAAGSRRQVPAA

SEQ ID NO: 18465 - protein, 15 aa, synthetic construct
SPRPPPRPGPDPRGG

SEQ ID NO: 18466 - protein, 15 aa, synthetic construct
SPRRCGPCRPPGPSA

SEQ ID NO: 18467 - protein, 15 aa, synthetic construct
SPRRLPPGWAAAAQG

SEQ ID NO: 18468 - protein, 15 aa, synthetic construct
SPRRPLLATKRRGAE

SEQ ID NO: 18469 - protein, 15 aa, synthetic construct
SPRRRRRRRRRRRRT

SEQ ID NO: 18470 - protein, 15 aa, synthetic construct
SPRSPRGRRPRARGH

SEQ ID NO: 18471 - protein, 15 aa, synthetic construct
SPRSRPRRQGTGRGS

SEQ ID NO: 18472 - protein, 15 aa, synthetic construct
SPSAASLCAASPPAA

SEQ ID NO: 18473 - protein, 15 aa, synthetic construct
SPSAASLCAASPTAA

SEQ ID NO: 18474 - protein, 15 aa, synthetic construct
SPSAPAPRRSPQPRR

SEQ ID NO: 18475 - protein, 15 aa, synthetic construct
SPSFTGSDSGRLGTP

SEQ ID NO: 18476 - protein, 15 aa, synthetic construct
SPSGEGDPPRHPGAT

SEQ ID NO: 18477 - protein, 15 aa, synthetic construct
SPSLPSTSRSSFWTE

SEQ ID NO: 18478 - protein, 15 aa, synthetic construct
SPSNQQYGREFGKQC

SEQ ID NO: 18479 - protein, 15 aa, synthetic construct
SPSRAVDSSPSTRRG

SEQ ID NO: 18480 - protein, 15 aa, synthetic construct
SPSRTCSTETTTGRP

SEQ ID NO: 18481 - protein, 15 aa, synthetic construct
SPSRTTASASPSPSR

SEQ ID NO: 18482 - protein, 15 aa, synthetic construct
SPSSPRSPRSKPAGG

SEQ ID NO: 18483 - protein, 15 aa, synthetic construct
SPSSRSSSRGIRTRS

SEQ ID NO: 18484 - protein, 15 aa, synthetic construct
SPSSWGPPGKPGQDV

SEQ ID NO: 18485 - protein, 15 aa, synthetic construct
SPSTSSAAEEPSASA

SEQ ID NO: 18486 - protein, 15 aa, synthetic construct
SPTAAAPAAASPAAA

SEQ ID NO: 18487 - protein, 15 aa, synthetic construct
SPTCPSPWPSSASSS

SEQ ID NO: 18488 - protein, 15 aa, synthetic construct
SPTGPTRPRTGSSTC

SEQ ID NO: 18489 - protein, 15 aa, synthetic construct
SPTGRSSSAKAPTMR

SEQ ID NO: 18490 - protein, 15 aa, synthetic construct
SPTPRTPTLAPAPAL

SEQ ID NO: 18491 - protein, 15 aa, synthetic construct
SPTPSGWSGTRPRAR

SEQ ID NO: 18492 - protein, 15 aa, synthetic construct
SPTSPPGTETDGSGA

SEQ ID NO: 18493 - protein, 15 aa, synthetic construct
SPTSTARTRAPGGRA

SEQ ID NO: 18494 - protein, 15 aa, synthetic construct
SPVISPMQRGMGSGL

SEQ ID NO: 18495 - protein, 15 aa, synthetic construct
SPVPAACDRRSTNVP

SEQ ID NO: 18496 - protein, 15 aa, synthetic construct
SQAAARPASVDFLAS

SEQ ID NO: 18497 - protein, 15 aa, synthetic construct
SQAAPAGGERRGARG

SEQ ID NO: 18498 - protein, 15 aa, synthetic construct
SQAAVKLAAASQAAA

SEQ ID NO: 18499 - protein, 15 aa, synthetic construct
SQARPGSQLPAGGGH

SEQ ID NO: 18500 - protein, 15 aa, synthetic construct
SQDCISVGPRPSRSQ

SEQ ID NO: 18501 - protein, 15 aa, synthetic construct
SQEPWPPAQPNCQHH

SEQ ID NO: 18502 - protein, 15 aa, synthetic construct
SQEQLPPADPQEWPC

SEQ ID NO: 18503 - protein, 15 aa, synthetic construct
SQHSPPLAASKESPV

SEQ ID NO: 18504 - protein, 15 aa, synthetic construct
SQLRDAQGGAGSGYA

SEQ ID NO: 18505 - protein, 15 aa, synthetic construct
SQLRPAGGAPGPAPR

SEQ ID NO: 18506 - protein, 15 aa, synthetic construct
SQLTGPPGPGPGDPG

SEQ ID NO: 18507 - protein, 15 aa, synthetic construct
SQPAAVPAAASPAAA

SEQ ID NO: 18508 - protein, 15 aa, synthetic construct
SQPALRSLADRVAGR

SEQ ID NO: 18509 - protein, 15 aa, synthetic construct
SQPEWRPPPGGATLR

SEQ ID NO: 18510 - protein, 15 aa, synthetic construct
SQPQPPHQRARPALP

SEQ ID NO: 18511 - protein, 15 aa, synthetic construct
SQPTLSASASARCLL

SEQ ID NO: 18512 - protein, 15 aa, synthetic construct
SQREDAAAPGRRTTS

SEQ ID NO: 18513 - protein, 15 aa, synthetic construct
SQRGAQETQEMGAQK

SEQ ID NO: 18514 - protein, 15 aa, synthetic construct
SQRTGDARLGCPMPL

SEQ ID NO: 18515 - protein, 15 aa, synthetic construct
SQTLLQEAQVLQGSP

SEQ ID NO: 18516 - protein, 15 aa, synthetic construct
SRAAAAPRSWSPSWP

SEQ ID NO: 18517 - protein, 15 aa, synthetic construct
SRAAAEEPQRGARSG

SEQ ID NO: 18518 - protein, 15 aa, synthetic construct
SRAACKLHAEEKGPD

SEQ ID NO: 18519 - protein, 15 aa, synthetic construct
SRAARPGPRPAAAAG

SEQ ID NO: 18520 - protein, 15 aa, synthetic construct
SRAGWITTSRGLGAT

SEQ ID NO: 18521 - protein, 15 aa, synthetic construct
SRALLPALAQPGRAT

SEQ ID NO: 18522 - protein, 15 aa, synthetic construct
SRAPRGRRRRRRGQG

SEQ ID NO: 18523 - protein, 15 aa, synthetic construct
SRAPRRAGGGEASGL

SEQ ID NO: 18524 - protein, 15 aa, synthetic construct
SRARGPAPASRAAVS

SEQ ID NO: 18525 - protein, 15 aa, synthetic construct
SRARPALVSSSRWGE

SEQ ID NO: 18526 - protein, 15 aa, synthetic construct
SRARPRRPWTSTATS

SEQ ID NO: 18527 - protein, 15 aa, synthetic construct
SRASAWRRTPKMCGT

SEQ ID NO: 18528 - protein, 15 aa, synthetic construct
SRASPSTLACCTPLP

SEQ ID NO: 18529 - protein, 15 aa, synthetic construct
SRCRPSCRRTSPSRS

SEQ ID NO: 18530 - protein, 15 aa, synthetic construct
SRCWSRRGRRAGRSR

SEQ ID NO: 18531 - protein, 15 aa, synthetic construct
SRDERAHRSVGQRAA

SEQ ID NO: 18532 - protein, 15 aa, synthetic construct
SREAALRGASGQLRS

SEQ ID NO: 18533 - protein, 15 aa, synthetic construct
SREEVPGGHRQVPPS

SEQ ID NO: 18534 - protein, 15 aa, synthetic construct
SREGWERERDAREGC

SEQ ID NO: 18535 - protein, 15 aa, synthetic construct
SREQPPARPGPGGRA

SEQ ID NO: 18536 - protein, 15 aa, synthetic construct
SRFFSRDSCYLCAAP

SEQ ID NO: 18537 - protein, 15 aa, synthetic construct
SRGCLSHPAAAAAAE

SEQ ID NO: 18538 - protein, 15 aa, synthetic construct
SRGEKHVTTSTRSGH

SEQ ID NO: 18539 - protein, 15 aa, synthetic construct
SRGEQKTQEEAMDRA

SEQ ID NO: 18540 - protein, 15 aa, synthetic construct
SRGFCSWDSGAAASP

SEQ ID NO: 18541 - protein, 15 aa, synthetic construct
SRGLRGARRPGELSP

SEQ ID NO: 18542 - protein, 15 aa, synthetic construct
SRGNGGSGERHLPDW

SEQ ID NO: 18543 - protein, 15 aa, synthetic construct
SRGRSGSLQTLTRRR

SEQ ID NO: 18544 - protein, 15 aa, synthetic construct
SRGSARAAAAALPGG

SEQ ID NO: 18545 - protein, 15 aa, synthetic construct
SRHQQRPQVHPHAGE

SEQ ID NO: 18546 - protein, 15 aa, synthetic construct
SRIPYWTAPPRRWRK

SEQ ID NO: 18547 - protein, 15 aa, synthetic construct
SRKIQFPPVGGRAGK

SEQ ID NO: 18548 - protein, 15 aa, synthetic construct
SRLFIPHPQDTQSPG

SEQ ID NO: 18549 - protein, 15 aa, synthetic construct
SRLPAAPRTAEPAPG

SEQ ID NO: 18550 - protein, 15 aa, synthetic construct
SRLPPRPAAPSATPV

SEQ ID NO: 18551 - protein, 15 aa, synthetic construct
SRLRGRRGRPALQAV

SEQ ID NO: 18552 - protein, 15 aa, synthetic construct
SRLRRLPSCTTPTMC

SEQ ID NO: 18553 - protein, 15 aa, synthetic construct
SRLTRTPWISAPKCS

SEQ ID NO: 18554 - protein, 15 aa, synthetic construct
SRLVQHWRFSSVDSS

SEQ ID NO: 18555 - protein, 15 aa, synthetic construct
SRPGVSSPCGDFGQP

SEQ ID NO: 18556 - protein, 15 aa, synthetic construct
SRPLCPASSGATSPP

SEQ ID NO: 18557 - protein, 15 aa, synthetic construct
SRPRTEPPWPRGLPT

SEQ ID NO: 18558 - protein, 15 aa, synthetic construct
SRPSSAERPSQEPQR

SEQ ID NO: 18559 - protein, 15 aa, synthetic construct
SRQEPPSPPAPARGV

SEQ ID NO: 18560 - protein, 15 aa, synthetic construct
SRRAARLSRGLGGLA

SEQ ID NO: 18561 - protein, 15 aa, synthetic construct
SRRAEAPGGLGHRLA

SEQ ID NO: 18562 - protein, 15 aa, synthetic construct
SRRAPSQRRALLRIV

SEQ ID NO: 18563 - protein, 15 aa, synthetic construct
SRRARRTRRRRSRRR

SEQ ID NO: 18564 - protein, 15 aa, synthetic construct
SRRCAGPAGAVARPG

SEQ ID NO: 18565 - protein, 15 aa, synthetic construct
SRRCAQPRTSSSASA

SEQ ID NO: 18566 - protein, 15 aa, synthetic construct
SRRCPRRCDNLKVPK

SEQ ID NO: 18567 - protein, 15 aa, synthetic construct
SRRGRGPGAAALAPG

SEQ ID NO: 18568 - protein, 15 aa, synthetic construct
SRRLPGPARGLALRR

SEQ ID NO: 18569 - protein, 15 aa, synthetic construct
SRRLRGARWPPQGRP

SEQ ID NO: 18570 - protein, 15 aa, synthetic construct
SRRNCTTSPSASWAA

SEQ ID NO: 18571 - protein, 15 aa, synthetic construct
SRRPGGDGGPGGGGG

SEQ ID NO: 18572 - protein, 15 aa, synthetic construct
SRRPGPRCGEAPAPG

SEQ ID NO: 18573 - protein, 15 aa, synthetic construct
SRRPGPRGLGRGLPA

SEQ ID NO: 18574 - protein, 15 aa, synthetic construct
SRRPNPPGSRAWTRG

SEQ ID NO: 18575 - protein, 15 aa, synthetic construct
SRRPRRACGAPRSPA

SEQ ID NO: 18576 - protein, 15 aa, synthetic construct
SRRPTQPVARVLVPK

SEQ ID NO: 18577 - protein, 15 aa, synthetic construct
SRRRPCGCGRTCATW

SEQ ID NO: 18578 - protein, 15 aa, synthetic construct
SRRRRRRSKRLRREA

SEQ ID NO: 18579 - protein, 15 aa, synthetic construct
SRRVRWRPASGPPPG

SEQ ID NO: 18580 - protein, 15 aa, synthetic construct
SRRWRSCCPGSGSPQ

SEQ ID NO: 18581 - protein, 15 aa, synthetic construct
SRSALRPLLPPPKVP

SEQ ID NO: 18582 - protein, 15 aa, synthetic construct
SRSAPAAGRGHLLLG

SEQ ID NO: 18583 - protein, 15 aa, synthetic construct
SRSAPRSPPSARPKA

SEQ ID NO: 18584 - protein, 15 aa, synthetic construct
SRSARTSRSAPSWRG

SEQ ID NO: 18585 - protein, 15 aa, synthetic construct
SRSATGFPRKCPRAP

SEQ ID NO: 18586 - protein, 15 aa, synthetic construct
SRSATRFRRSWPRAR

SEQ ID NO: 18587 - protein, 15 aa, synthetic construct
SRSCRASASWPTCAS

SEQ ID NO: 18588 - protein, 15 aa, synthetic construct
SRSGGDTTRSSCSSS

SEQ ID NO: 18589 - protein, 15 aa, synthetic construct
SRSGRVLERRTQQLP

SEQ ID NO: 18590 - protein, 15 aa, synthetic construct
SRSGSGTRASSWPQR

SEQ ID NO: 18591 - protein, 15 aa, synthetic construct
SRSPAAEPARSECTR

SEQ ID NO: 18592 - protein, 15 aa, synthetic construct
SRSRSAPASCSWDSS

SEQ ID NO: 18593 - protein, 15 aa, synthetic construct
SRSSARSRRRWSSPT

SEQ ID NO: 18594 - protein, 15 aa, synthetic construct
SRSSLPPHRRPPRLP

SEQ ID NO: 18595 - protein, 15 aa, synthetic construct
SRSSPPCPTCSSSLS

SEQ ID NO: 18596 - protein, 15 aa, synthetic construct
SRSSRRRPGRLWVGK

SEQ ID NO: 18597 - protein, 15 aa, synthetic construct
SRSTARGAAPTRASR

SEQ ID NO: 18598 - protein, 15 aa, synthetic construct
SRTARRAASTPVRSA

SEQ ID NO: 18599 - protein, 15 aa, synthetic construct
SRTERGLLSGRGTSR

SEQ ID NO: 18600 - protein, 15 aa, synthetic construct
SRTPQSPARGAPSEG

SEQ ID NO: 18601 - protein, 15 aa, synthetic construct
SRTRPSRPSPRPWAS

SEQ ID NO: 18602 - protein, 15 aa, synthetic construct
SRVAASPRASAAALP

SEQ ID NO: 18603 - protein, 15 aa, synthetic construct
SRWPKDSDAPLWALL

SEQ ID NO: 18604 - protein, 15 aa, synthetic construct
SRWRPPRGPGPGAAS

SEQ ID NO: 18605 - protein, 15 aa, synthetic construct
SRWRPSRPQWWARRR

SEQ ID NO: 18606 - protein, 15 aa, synthetic construct
SRWTHPHPDPRGPPE

SEQ ID NO: 18607 - protein, 15 aa, synthetic construct
SSAALQREPGLGPRA

SEQ ID NO: 18608 - protein, 15 aa, synthetic construct
SSAARPAGGCTTLGP

SEQ ID NO: 18609 - protein, 15 aa, synthetic construct
SSAASWQRAPCAPSA

SEQ ID NO: 18610 - protein, 15 aa, synthetic construct
SSAASWRHAHCAPSP

SEQ ID NO: 18611 - protein, 15 aa, synthetic construct
SSAGAPSAAGEAPAT

SEQ ID NO: 18612 - protein, 15 aa, synthetic construct
SSAGGRAAGRGDVLH

SEQ ID NO: 18613 - protein, 15 aa, synthetic construct
SSAKFTWDYSLAAPR

SEQ ID NO: 18614 - protein, 15 aa, synthetic construct
SSALRLLPSSFSSSA

SEQ ID NO: 18615 - protein, 15 aa, synthetic construct
SSARDQVAGPVRFLA

SEQ ID NO: 18616 - protein, 15 aa, synthetic construct
SSARSCSRASTSSRC

SEQ ID NO: 18617 - protein, 15 aa, synthetic construct
SSARSPLPPASIGCT

SEQ ID NO: 18618 - protein, 15 aa, synthetic construct
SSASCWAAPSGASSK

SEQ ID NO: 18619 - protein, 15 aa, synthetic construct
SSAWRSALSASRSRC

SEQ ID NO: 18620 - protein, 15 aa, synthetic construct
SSAWTPRLESAAQCL

SEQ ID NO: 18621 - protein, 15 aa, synthetic construct
SSCSSGASGPGGRHR

SEQ ID NO: 18622 - protein, 15 aa, synthetic construct
SSCSSNTSLARSSPS

SEQ ID NO: 18623 - protein, 15 aa, synthetic construct
SSCWCPCGGRCTAAG

SEQ ID NO: 18624 - protein, 15 aa, synthetic construct
SSDSEDCRQPERLYG

SEQ ID NO: 18625 - protein, 15 aa, synthetic construct
SSEASSAPACGRPAQ

SEQ ID NO: 18626 - protein, 15 aa, synthetic construct
SSEGKDLRRDQSSRR

SEQ ID NO: 18627 - protein, 15 aa, synthetic construct
SSFHPDPAGQKGLRL

SEQ ID NO: 18628 - protein, 15 aa, synthetic construct
SSGAWRPARAGSAAG

SEQ ID NO: 18629 - protein, 15 aa, synthetic construct
SSGGGQQRRGPLPSR

SEQ ID NO: 18630 - protein, 15 aa, synthetic construct
SSGKILSRLLTLRPT

SEQ ID NO: 18631 - protein, 15 aa, synthetic construct
SSGPGTAAEEGEQTQ

SEQ ID NO: 18632 - protein, 15 aa, synthetic construct
SSGRGARLCTSKVAG

SEQ ID NO: 18633 - protein, 15 aa, synthetic construct
SSGRRGGAGGAAVAR

SEQ ID NO: 18634 - protein, 15 aa, synthetic construct
SSGTSSLWPTGRSCC

SEQ ID NO: 18635 - protein, 15 aa, synthetic construct
SSHRRRRPREAPEVL

SEQ ID NO: 18636 - protein, 15 aa, synthetic construct
SSHTWPSLTCPMLPT

SEQ ID NO: 18637 - protein, 15 aa, synthetic construct
SSHTWRSSTSPVLAA

SEQ ID NO: 18638 - protein, 15 aa, synthetic construct
SSLCCPGLSQFAWLQ

SEQ ID NO: 18639 - protein, 15 aa, synthetic construct
SSLGRADSIQQMHWS

SEQ ID NO: 18640 - protein, 15 aa, synthetic construct
SSLMTARSFTRWTGS

SEQ ID NO: 18641 - protein, 15 aa, synthetic construct
SSLPTQATPSSLPWA

SEQ ID NO: 18642 - protein, 15 aa, synthetic construct
SSLSGVFRGPGGWGA

SEQ ID NO: 18643 - protein, 15 aa, synthetic construct
SSLWVSQDCNLHIFG

SEQ ID NO: 18644 - protein, 15 aa, synthetic construct
SSMPLHPRPFVHASS

SEQ ID NO: 18645 - protein, 15 aa, synthetic construct
SSPASPRGCGPRAAR

SEQ ID NO: 18646 - protein, 15 aa, synthetic construct
SSPCSLPASPRSAGI

SEQ ID NO: 18647 - protein, 15 aa, synthetic construct
SSPENLLRLLKDALQ

SEQ ID NO: 18648 - protein, 15 aa, synthetic construct
SSPGRHGPAGDSSAG

SEQ ID NO: 18649 - protein, 15 aa, synthetic construct
SSPHTWSPSLEMPSL

SEQ ID NO: 18650 - protein, 15 aa, synthetic construct
SSPKGRRRRVSPAQR

SEQ ID NO: 18651 - protein, 15 aa, synthetic construct
SSPPAPAPCAVPPLA

SEQ ID NO: 18652 - protein, 15 aa, synthetic construct
SSPPATRTARGAWSA

SEQ ID NO: 18653 - protein, 15 aa, synthetic construct
SSPSAISCSASSAPV

SEQ ID NO: 18654 - protein, 15 aa, synthetic construct
SSPSSNSSSSWGSCS

SEQ ID NO: 18655 - protein, 15 aa, synthetic construct
SSPTQPWPGPGDHPS

SEQ ID NO: 18656 - protein, 15 aa, synthetic construct
SSPVAEDEAQRRGVP

SEQ ID NO: 18657 - protein, 15 aa, synthetic construct
SSQAALQDFHDRRDP

SEQ ID NO: 18658 - protein, 15 aa, synthetic construct
SSQAHRQESPGRAGL

SEQ ID NO: 18659 - protein, 15 aa, synthetic construct
SSQAWRAPKASASLT

SEQ ID NO: 18660 - protein, 15 aa, synthetic construct
SSQDRRPPPHRCPHR

SEQ ID NO: 18661 - protein, 15 aa, synthetic construct
SSQTCPWPPRDALSS

SEQ ID NO: 18662 - protein, 15 aa, synthetic construct
SSQVAPGAPGLPRGG

SEQ ID NO: 18663 - protein, 15 aa, synthetic construct
SSRCFWILNKMAFRA

SEQ ID NO: 18664 - protein, 15 aa, synthetic construct
SSRDSDGGAWRSPRS

SEQ ID NO: 18665 - protein, 15 aa, synthetic construct
SSRWPRPTRCCRTPR

SEQ ID NO: 18666 - protein, 15 aa, synthetic construct
SSSAGSGCALTLPAC

SEQ ID NO: 18667 - protein, 15 aa, synthetic construct
SSSAMPGSGGSWMPS

SEQ ID NO: 18668 - protein, 15 aa, synthetic construct
SSSARTTSSANTRSA

SEQ ID NO: 18669 - protein, 15 aa, synthetic construct
SSSCCSPSPFSQSGS

SEQ ID NO: 18670 - protein, 15 aa, synthetic construct
SSSGMSPRLEALGAR

SEQ ID NO: 18671 - protein, 15 aa, synthetic construct
SSSGRAAGLRSVRER

SEQ ID NO: 18672 - protein, 15 aa, synthetic construct
SSSKPTAPCWWSTVA

SEQ ID NO: 18673 - protein, 15 aa, synthetic construct
SSSPGGGSLSSGRWT

SEQ ID NO: 18674 - protein, 15 aa, synthetic construct
SSSPSPATASTCGAK

SEQ ID NO: 18675 - protein, 15 aa, synthetic construct
SSSSACPWTSFASGS

SEQ ID NO: 18676 - protein, 15 aa, synthetic construct
SSSSPDSGRAAGRAG

SEQ ID NO: 18677 - protein, 15 aa, synthetic construct
SSSSRIRTASPVLWD

SEQ ID NO: 18678 - protein, 15 aa, synthetic construct
SSSSSHRIPCLSSPN

SEQ ID NO: 18679 - protein, 15 aa, synthetic construct
SSSSSSNSSSSHHRQ

SEQ ID NO: 18680 - protein, 15 aa, synthetic construct
SSSSSSTARSRRPGC

SEQ ID NO: 18681 - protein, 15 aa, synthetic construct
SSSSTTMRTSASAWC

SEQ ID NO: 18682 - protein, 15 aa, synthetic construct
SSSTATWSTWTSGTT

SEQ ID NO: 18683 - protein, 15 aa, synthetic construct
SSSTVWCGRASASSR

SEQ ID NO: 18684 - protein, 15 aa, synthetic construct
SSSVNCSSWTSCSSA

SEQ ID NO: 18685 - protein, 15 aa, synthetic construct
SSTAATSWCRRRTES

SEQ ID NO: 18686 - protein, 15 aa, synthetic construct
SSTAGPASCTKPAWL

SEQ ID NO: 18687 - protein, 15 aa, synthetic construct
SSTDPRPGAGMRPEQ

SEQ ID NO: 18688 - protein, 15 aa, synthetic construct
SSTRASVRTASSPAS

SEQ ID NO: 18689 - protein, 15 aa, synthetic construct
SSTTASRSTRAPRPS

SEQ ID NO: 18690 - protein, 15 aa, synthetic construct
SSWDSQRIQNCSRSS

SEQ ID NO: 18691 - protein, 15 aa, synthetic construct
SSWGARGRRRGPGAA

SEQ ID NO: 18692 - protein, 15 aa, synthetic construct
SSWGCGGRVGELADR

SEQ ID NO: 18693 - protein, 15 aa, synthetic construct
SSWPTSPSLTSSLSP

SEQ ID NO: 18694 - protein, 15 aa, synthetic construct
STAACSPRWRAPTRT

SEQ ID NO: 18695 - protein, 15 aa, synthetic construct
STAPALRASPSTRDW

SEQ ID NO: 18696 - protein, 15 aa, synthetic construct
STAPRPGPRQLTERG

SEQ ID NO: 18697 - protein, 15 aa, synthetic construct
STAPSVRRCSKRPCG

SEQ ID NO: 18698 - protein, 15 aa, synthetic construct
STATCASLASRAPAR

SEQ ID NO: 18699 - protein, 15 aa, synthetic construct
STEGWGPGHQVLGEP

SEQ ID NO: 18700 - protein, 15 aa, synthetic construct
STGPAAQSAGRGESR

SEQ ID NO: 18701 - protein, 15 aa, synthetic construct
STGVEEAAAAAASTT

SEQ ID NO: 18702 - protein, 15 aa, synthetic construct
STLPSRRTARPSKTA

SEQ ID NO: 18703 - protein, 15 aa, synthetic construct
STPARAPATPTASSP

SEQ ID NO: 18704 - protein, 15 aa, synthetic construct
STPPPKPDTQAQAES

SEQ ID NO: 18705 - protein, 15 aa, synthetic construct
STPTGSAAASGTTCL

SEQ ID NO: 18706 - protein, 15 aa, synthetic construct
STQMQVQEEEEAEVQ

SEQ ID NO: 18707 - protein, 15 aa, synthetic construct
STQPKDSDAPLWAFL

SEQ ID NO: 18708 - protein, 15 aa, synthetic construct
STRDHQFSKQPLAAA

SEQ ID NO: 18709 - protein, 15 aa, synthetic construct
STRGRPGCCPGPGEQ

SEQ ID NO: 18710 - protein, 15 aa, synthetic construct
STRSGSGDRRPGLLQ

SEQ ID NO: 18711 - protein, 15 aa, synthetic construct
STRSSARAEARQAAV

SEQ ID NO: 18712 - protein, 15 aa, synthetic construct
STRWARESERTAPAA

SEQ ID NO: 18713 - protein, 15 aa, synthetic construct
STSACSPARAEMRAR

SEQ ID NO: 18714 - protein, 15 aa, synthetic construct
STSRSGSSWGCWATT

SEQ ID NO: 18715 - protein, 15 aa, synthetic construct
STSTASLRGLPTVAT

SEQ ID NO: 18716 - protein, 15 aa, synthetic construct
STSWNSSTTSASSPW

SEQ ID NO: 18717 - protein, 15 aa, synthetic construct
STTPSPRRPNTAPSW

SEQ ID NO: 18718 - protein, 15 aa, synthetic construct
STTPSPSDRTASRLT

SEQ ID NO: 18719 - protein, 15 aa, synthetic construct
STTPSRRRPNTAPSW

SEQ ID NO: 18720 - protein, 15 aa, synthetic construct
STTRSPRRPNTAPSW

SEQ ID NO: 18721 - protein, 15 aa, synthetic construct
STTRSRRKPNTAPSL

SEQ ID NO: 18722 - protein, 15 aa, synthetic construct
STVGARRALTLPRER

SEQ ID NO: 18723 - protein, 15 aa, synthetic construct
STVSRGSCTSCSTSG

SEQ ID NO: 18724 - protein, 15 aa, synthetic construct
STWCWSSRQCRSCEC

SEQ ID NO: 18725 - protein, 15 aa, synthetic construct
SVEGPCAGHEGPEAD

SEQ ID NO: 18726 - protein, 15 aa, synthetic construct
SVEPLALHQPLQGCG

SEQ ID NO: 18727 - protein, 15 aa, synthetic construct
SVGGAAPAGSSYAGG

SEQ ID NO: 18728 - protein, 15 aa, synthetic construct
SVLEPEGQVQLHRPL

SEQ ID NO: 18729 - protein, 15 aa, synthetic construct
SVLPGLPDPKLCPRP

SEQ ID NO: 18730 - protein, 15 aa, synthetic construct
SVPCSTSSTLDVPIV

SEQ ID NO: 18731 - protein, 15 aa, synthetic construct
SVRGLWTQGGRGLEE

SEQ ID NO: 18732 - protein, 15 aa, synthetic construct
SVRGTSGTGRTRGCV

SEQ ID NO: 18733 - protein, 15 aa, synthetic construct
SWATAPPCTWARCAR

SEQ ID NO: 18734 - protein, 15 aa, synthetic construct
SWESPASAGAAASAA

SEQ ID NO: 18735 - protein, 15 aa, synthetic construct
SWGGGGRGVAGGGGR

SEQ ID NO: 18736 - protein, 15 aa, synthetic construct
SWGNSGSDYQPESPA

SEQ ID NO: 18737 - protein, 15 aa, synthetic construct
SWGWGSSSATLPSPK

SEQ ID NO: 18738 - protein, 15 aa, synthetic construct
SWMTSATLSPTMSNC

SEQ ID NO: 18739 - protein, 15 aa, synthetic construct
SWPQSQTPTSTPPCT

SEQ ID NO: 18740 - protein, 15 aa, synthetic construct
SWPWAVSPALPRTPD

SEQ ID NO: 18741 - protein, 15 aa, synthetic construct
SWRNWAACCCWRGAT

SEQ ID NO: 18742 - protein, 15 aa, synthetic construct
SWRRPRRRRSGDGPR

SEQ ID NO: 18743 - protein, 15 aa, synthetic construct
SWSFWQPWGCGMSSS

SEQ ID NO: 18744 - protein, 15 aa, synthetic construct
SWWTHPHRDPRGPPE

SEQ ID NO: 18745 - protein, 15 aa, synthetic construct
SYPAVLDGASDLQLP

SEQ ID NO: 18746 - protein, 15 aa, synthetic construct
SYSWASFADRAAAAS

SEQ ID NO: 18747 - protein, 15 aa, synthetic construct
TAAAPSSRPQTHGAA

SEQ ID NO: 18748 - protein, 15 aa, synthetic construct
TAAGALWVLDACRLF

SEQ ID NO: 18749 - protein, 15 aa, synthetic construct
TAAGRSKSCPPPRYC

SEQ ID NO: 18750 - protein, 15 aa, synthetic construct
TAARRRRTRTPTAAG

SEQ ID NO: 18751 - protein, 15 aa, synthetic construct
TAASSSSAAASSRAV

SEQ ID NO: 18752 - protein, 15 aa, synthetic construct
TAASYAAQSATRPTT

SEQ ID NO: 18753 - protein, 15 aa, synthetic construct
TAATASAARRTAPPW

SEQ ID NO: 18754 - protein, 15 aa, synthetic construct
TADLWLCQGREAAGS

SEQ ID NO: 18755 - protein, 15 aa, synthetic construct
TAEAAGHQGSAQKRS

SEQ ID NO: 18756 - protein, 15 aa, synthetic construct
TAGEHAEPPLRSGGG

SEQ ID NO: 18757 - protein, 15 aa, synthetic construct
TAGSAEPGPAQRRAQ

SEQ ID NO: 18758 - protein, 15 aa, synthetic construct
TAGSLQMPRQSQANH

SEQ ID NO: 18759 - protein, 15 aa, synthetic construct
TAGTGEHFQGHSARG

SEQ ID NO: 18760 - protein, 15 aa, synthetic construct
TAKGRPAARASPART

SEQ ID NO: 18761 - protein, 15 aa, synthetic construct
TALGQTLHGLWRPQK

SEQ ID NO: 18762 - protein, 15 aa, synthetic construct
TAPAAASGAPAGVPV

SEQ ID NO: 18763 - protein, 15 aa, synthetic construct
TAPAALPVAGRPALG

SEQ ID NO: 18764 - protein, 15 aa, synthetic construct
TAPADSRSHSLRAAA

SEQ ID NO: 18765 - protein, 15 aa, synthetic construct
TAPAPATSAAGSRTA

SEQ ID NO: 18766 - protein, 15 aa, synthetic construct
TAPQDPARALSPGAG

SEQ ID NO: 18767 - protein, 15 aa, synthetic construct
TAPTRTPGPLAPRRP

SEQ ID NO: 18768 - protein, 15 aa, synthetic construct
TAPTSTGPASRRRAP

SEQ ID NO: 18769 - protein, 15 aa, synthetic construct
TAPTSTTTTTTTTTA

SEQ ID NO: 18770 - protein, 15 aa, synthetic construct
TAQATARAMAGATNP

SEQ ID NO: 18771 - protein, 15 aa, synthetic construct
TAQPLLPRGQGAAVL

SEQ ID NO: 18772 - protein, 15 aa, synthetic construct
TAQSCPGGRTSSGAR

SEQ ID NO: 18773 - protein, 15 aa, synthetic construct
TARARPEALGAGREP

SEQ ID NO: 18774 - protein, 15 aa, synthetic construct
TARGELPAGLHGRGG

SEQ ID NO: 18775 - protein, 15 aa, synthetic construct
TARMKRGSQPTGSMT

SEQ ID NO: 18776 - protein, 15 aa, synthetic construct
TASARARPWPQRPRR

SEQ ID NO: 18777 - protein, 15 aa, synthetic construct
TASASPSPSRCARTS

SEQ ID NO: 18778 - protein, 15 aa, synthetic construct
TASRALASLAGRTKT

SEQ ID NO: 18779 - protein, 15 aa, synthetic construct
TASTARATAPAAGVP

SEQ ID NO: 18780 - protein, 15 aa, synthetic construct
TATATAARTWATLSC

SEQ ID NO: 18781 - protein, 15 aa, synthetic construct
TATPPSTATSRWSST

SEQ ID NO: 18782 - protein, 15 aa, synthetic construct
TATRTSTARSRARAA

SEQ ID NO: 18783 - protein, 15 aa, synthetic construct
TATSCAACGARPGCA

SEQ ID NO: 18784 - protein, 15 aa, synthetic construct
TATSCASCRRKGSTP

SEQ ID NO: 18785 - protein, 15 aa, synthetic construct
TATSSSSFMPGTWGR

SEQ ID NO: 18786 - protein, 15 aa, synthetic construct
TATTSAAAACSSPRA

SEQ ID NO: 18787 - protein, 15 aa, synthetic construct
TAVPADGASRSGARH

SEQ ID NO: 18788 - protein, 15 aa, synthetic construct
TAVPALPGPLQAQFF

SEQ ID NO: 18789 - protein, 15 aa, synthetic construct
TAVPWTPRPCRRAWR

SEQ ID NO: 18790 - protein, 15 aa, synthetic construct
TCAAALARAPGRTRG

SEQ ID NO: 18791 - protein, 15 aa, synthetic construct
TCRPGAAGRHLRARD

SEQ ID NO: 18792 - protein, 15 aa, synthetic construct
TCRSGALRWRRSMDG

SEQ ID NO: 18793 - protein, 15 aa, synthetic construct
TCSPCWWCRASASCA

SEQ ID NO: 18794 - protein, 15 aa, synthetic construct
TCVSRSCASCSACPS

SEQ ID NO: 18795 - protein, 15 aa, synthetic construct
TDESAFKWREVRKSW

SEQ ID NO: 18796 - protein, 15 aa, synthetic construct
TDRRPSAREDPVWGI

SEQ ID NO: 18797 - protein, 15 aa, synthetic construct
TDRRPSAREDPVWGV

SEQ ID NO: 18798 - protein, 15 aa, synthetic construct
TDTVELRKSPLSRCN

SEQ ID NO: 18799 - protein, 15 aa, synthetic construct
TEPKGEPEESRRGGA

SEQ ID NO: 18800 - protein, 15 aa, synthetic construct
TFPDAPGELLSRHPR

SEQ ID NO: 18801 - protein, 15 aa, synthetic construct
TFPSVSPPGNLLLQI

SEQ ID NO: 18802 - protein, 15 aa, synthetic construct
TFTMARPTLLPSVGP

SEQ ID NO: 18803 - protein, 15 aa, synthetic construct
TGAAPGPAPPLDPQP

SEQ ID NO: 18804 - protein, 15 aa, synthetic construct
TGAGGGAAQSLAPAG

SEQ ID NO: 18805 - protein, 15 aa, synthetic construct
TGARGKQVTDARAHL

SEQ ID NO: 18806 - protein, 15 aa, synthetic construct
TGAVTLRDTAAASRG

SEQ ID NO: 18807 - protein, 15 aa, synthetic construct
TGEPCLPAGRGPHHH

SEQ ID NO: 18808 - protein, 15 aa, synthetic construct
TGGAQEVQDEAGDGA

SEQ ID NO: 18809 - protein, 15 aa, synthetic construct
TGGDAQVELRAGART

SEQ ID NO: 18810 - protein, 15 aa, synthetic construct
TGHRVQPEAHAAPHQ

SEQ ID NO: 18811 - protein, 15 aa, synthetic construct
TGPGTSATSSANSSN

SEQ ID NO: 18812 - protein, 15 aa, synthetic construct
TGPRQPAPRHGHLPA

SEQ ID NO: 18813 - protein, 15 aa, synthetic construct
TGPRSRGAEAESSQS

SEQ ID NO: 18814 - protein, 15 aa, synthetic construct
TGPTRPRATPAKPSC

SEQ ID NO: 18815 - protein, 15 aa, synthetic construct
TGRGADGGELTDRQF

SEQ ID NO: 18816 - protein, 15 aa, synthetic construct
TGSGEAADALGSRCP

SEQ ID NO: 18817 - protein, 15 aa, synthetic construct
TGSGGGSGRAVGAGA

SEQ ID NO: 18818 - protein, 15 aa, synthetic construct
TGSGSGTEGQSSSKM

SEQ ID NO: 18819 - protein, 15 aa, synthetic construct
TGSPGEAAAAAAATA

SEQ ID NO: 18820 - protein, 15 aa, synthetic construct
THRTAWASRPGPRRP

SEQ ID NO: 18821 - protein, 15 aa, synthetic construct
TIAGWPRSGRPAARS

SEQ ID NO: 18822 - protein, 15 aa, synthetic construct
TIDRGTDPGTRAGSE

SEQ ID NO: 18823 - protein, 15 aa, synthetic construct
TKANGKGRERAAREI

SEQ ID NO: 18824 - protein, 15 aa, synthetic construct
TKTATAAAGMYASWT

SEQ ID NO: 18825 - protein, 15 aa, synthetic construct
TKVNPIPQRTRITAA

SEQ ID NO: 18826 - protein, 15 aa, synthetic construct
TLAPRSLFPVAGAPL

SEQ ID NO: 18827 - protein, 15 aa, synthetic construct
TLGAASPAAAAPAAV

SEQ ID NO: 18828 - protein, 15 aa, synthetic construct
TLGGCCHLRRGRGVA

SEQ ID NO: 18829 - protein, 15 aa, synthetic construct
TLRKARAGDASLFPV

SEQ ID NO: 18830 - protein, 15 aa, synthetic construct
TLSPWPLCGTGAGDV

SEQ ID NO: 18831 - protein, 15 aa, synthetic construct
TLSQHQGSFPGPSQQ

SEQ ID NO: 18832 - protein, 15 aa, synthetic construct
TMASWCPSRDTRANA

SEQ ID NO: 18833 - protein, 15 aa, synthetic construct
TMSLSTSTGGGWQPA

SEQ ID NO: 18834 - protein, 15 aa, synthetic construct
TNLPTRAAWVSSASE

SEQ ID NO: 18835 - protein, 15 aa, synthetic construct
TPACGPSSCGGRAHC

SEQ ID NO: 18836 - protein, 15 aa, synthetic construct
TPAGHSSISSAISSL

SEQ ID NO: 18837 - protein, 15 aa, synthetic construct
TPAQDGGSGGADGGR

SEQ ID NO: 18838 - protein, 15 aa, synthetic construct
TPATWPPSTAATPST

SEQ ID NO: 18839 - protein, 15 aa, synthetic construct
TPGAQAPSREATRCS

SEQ ID NO: 18840 - protein, 15 aa, synthetic construct
TPGGCCDGGHCAPAY

SEQ ID NO: 18841 - protein, 15 aa, synthetic construct
TPGPMWPPGLCPRCC

SEQ ID NO: 18842 - protein, 15 aa, synthetic construct
TPGQSSWPGAPERSL

SEQ ID NO: 18843 - protein, 15 aa, synthetic construct
TPLPRAAWPSCAGWS

SEQ ID NO: 18844 - protein, 15 aa, synthetic construct
TPPAFNQDRHRRPGC

SEQ ID NO: 18845 - protein, 15 aa, synthetic construct
TPPPPRPPATRPPPP

SEQ ID NO: 18846 - protein, 15 aa, synthetic construct
TPPPRPRPPSGPGAA

SEQ ID NO: 18847 - protein, 15 aa, synthetic construct
TPPQTTQSWTARRAR

SEQ ID NO: 18848 - protein, 15 aa, synthetic construct
TPPRATGAAAPPACA

SEQ ID NO: 18849 - protein, 15 aa, synthetic construct
TPPSMDLDPGRLGCE

SEQ ID NO: 18850 - protein, 15 aa, synthetic construct
TPPTPSSWAPAPSSW

SEQ ID NO: 18851 - protein, 15 aa, synthetic construct
TPPVPSPLRGGRREP

SEQ ID NO: 18852 - protein, 15 aa, synthetic construct
TPQGAKPQTGAREVQ

SEQ ID NO: 18853 - protein, 15 aa, synthetic construct
TPQPPTNSALSGLTR

SEQ ID NO: 18854 - protein, 15 aa, synthetic construct
TPQQERPQLPVHGGA

SEQ ID NO: 18855 - protein, 15 aa, synthetic construct
TPRPGTVTNRLPSTS

SEQ ID NO: 18856 - protein, 15 aa, synthetic construct
TPRRPRARSAGSAAG

SEQ ID NO: 18857 - protein, 15 aa, synthetic construct
TPRRRGPGAAKTPAA

SEQ ID NO: 18858 - protein, 15 aa, synthetic construct
TPRRRLRRTSPLPPP

SEQ ID NO: 18859 - protein, 15 aa, synthetic construct
TPRTREGAAAAPRAQ

SEQ ID NO: 18860 - protein, 15 aa, synthetic construct
TPRVAERLAAPRPRR

SEQ ID NO: 18861 - protein, 15 aa, synthetic construct
TPRVRAPASPSPPPS

SEQ ID NO: 18862 - protein, 15 aa, synthetic construct
TPRWGKKGRAVGSWR

SEQ ID NO: 18863 - protein, 15 aa, synthetic construct
TPSPGTVTNRLPSTS

SEQ ID NO: 18864 - protein, 15 aa, synthetic construct
TPSRCGDCRCQPEPE

SEQ ID NO: 18865 - protein, 15 aa, synthetic construct
TPSTGIWVPTREAFF

SEQ ID NO: 18866 - protein, 15 aa, synthetic construct
TPTKTLRTRRKRRGD

SEQ ID NO: 18867 - protein, 15 aa, synthetic construct
TPTMRTAAGAPSCRW

SEQ ID NO: 18868 - protein, 15 aa, synthetic construct
TPTPRPRSLPPLGLR

SEQ ID NO: 18869 - protein, 15 aa, synthetic construct
TPTPWSGSRTPSCAS

SEQ ID NO: 18870 - protein, 15 aa, synthetic construct
TPVGSAAATRGPVAG

SEQ ID NO: 18871 - protein, 15 aa, synthetic construct
TPWAVRQQRRQDAAL

SEQ ID NO: 18872 - protein, 15 aa, synthetic construct
TQGGSSLRSAETFSF

SEQ ID NO: 18873 - protein, 15 aa, synthetic construct
TQKKRSAKWTRGTEK

SEQ ID NO: 18874 - protein, 15 aa, synthetic construct
TQPGFSPDSDSHPGT

SEQ ID NO: 18875 - protein, 15 aa, synthetic construct
TQRHVQPAPAGSPAG

SEQ ID NO: 18876 - protein, 15 aa, synthetic construct
TQSCCCRWGQAAKTQ

SEQ ID NO: 18877 - protein, 15 aa, synthetic construct
TRACWPPPPRAWGPR

SEQ ID NO: 18878 - protein, 15 aa, synthetic construct
TRAQRRAHPARAPGP

SEQ ID NO: 18879 - protein, 15 aa, synthetic construct
TRARARRPPAHLALA

SEQ ID NO: 18880 - protein, 15 aa, synthetic construct
TRAYSRPRRWSPSTA

SEQ ID NO: 18881 - protein, 15 aa, synthetic construct
TRCATAALPRCGCSA

SEQ ID NO: 18882 - protein, 15 aa, synthetic construct
TRCGTSCGGSGPGTA

SEQ ID NO: 18883 - protein, 15 aa, synthetic construct
TRCRRAASTWRRAAS

SEQ ID NO: 18884 - protein, 15 aa, synthetic construct
TRDRPGHEALPVGAL

SEQ ID NO: 18885 - protein, 15 aa, synthetic construct
TRECSSPKRNKTSLT

SEQ ID NO: 18886 - protein, 15 aa, synthetic construct
TRGHSVGHLQPFFHC

SEQ ID NO: 18887 - protein, 15 aa, synthetic construct
TRGNKAAMGRKDSSF

SEQ ID NO: 18888 - protein, 15 aa, synthetic construct
TRGPSSTHLCTFALS

SEQ ID NO: 18889 - protein, 15 aa, synthetic construct
TRKPSPCAPPAPWAA

SEQ ID NO: 18890 - protein, 15 aa, synthetic construct
TRKWPKERERAGREA

SEQ ID NO: 18891 - protein, 15 aa, synthetic construct
TRLGGLPGLQSPREA

SEQ ID NO: 18892 - protein, 15 aa, synthetic construct
TRPLRREPKKTRKRT

SEQ ID NO: 18893 - protein, 15 aa, synthetic construct
TRPPARTGRPQAWRP

SEQ ID NO: 18894 - protein, 15 aa, synthetic construct
TRPTSTWPRAPASPP

SEQ ID NO: 18895 - protein, 15 aa, synthetic construct
TRQGRRRRHRPSRRR

SEQ ID NO: 18896 - protein, 15 aa, synthetic construct
TRRARGGAAGGGRQS

SEQ ID NO: 18897 - protein, 15 aa, synthetic construct
TRRASCASGLPGAKS

SEQ ID NO: 18898 - protein, 15 aa, synthetic construct
TRRASCSSAAAKWGS

SEQ ID NO: 18899 - protein, 15 aa, synthetic construct
TRRCRRACCAGPRSA

SEQ ID NO: 18900 - protein, 15 aa, synthetic construct
TRRGRRGCRGRRTLR

SEQ ID NO: 18901 - protein, 15 aa, synthetic construct
TRRPLKGPGGSGGDL

SEQ ID NO: 18902 - protein, 15 aa, synthetic construct
TRRPWPRRPLQGRFS

SEQ ID NO: 18903 - protein, 15 aa, synthetic construct
TRRRAGAQMSCPRRA

SEQ ID NO: 18904 - protein, 15 aa, synthetic construct
TRRRAPSSRPGPTGP

SEQ ID NO: 18905 - protein, 15 aa, synthetic construct
TRRRRRPSSPGLRRA

SEQ ID NO: 18906 - protein, 15 aa, synthetic construct
TRRTARAATAAAAAA

SEQ ID NO: 18907 - protein, 15 aa, synthetic construct
TRSGCGRRPGRGARS

SEQ ID NO: 18908 - protein, 15 aa, synthetic construct
TRSLGRSSARKYQPK

SEQ ID NO: 18909 - protein, 15 aa, synthetic construct
TRTRQRRRRRPCRTR

SEQ ID NO: 18910 - protein, 15 aa, synthetic construct
TRTRRRISIPAHVEI

SEQ ID NO: 18911 - protein, 15 aa, synthetic construct
TRTWSSTGRRSRCRR

SEQ ID NO: 18912 - protein, 15 aa, synthetic construct
TRVSGAARAACSARR

SEQ ID NO: 18913 - protein, 15 aa, synthetic construct
TRWTAGPRARLPPSA

SEQ ID NO: 18914 - protein, 15 aa, synthetic construct
TSAMGGHGGARPPPP

SEQ ID NO: 18915 - protein, 15 aa, synthetic construct
TSATAAWCAPPARAS

SEQ ID NO: 18916 - protein, 15 aa, synthetic construct
TSATASHCTAACPSA

SEQ ID NO: 18917 - protein, 15 aa, synthetic construct
TSATGCSDRRWPSAW

SEQ ID NO: 18918 - protein, 15 aa, synthetic construct
TSCCRSSGPVAAASR

SEQ ID NO: 18919 - protein, 15 aa, synthetic construct
TSEQGPSAAELPGQP

SEQ ID NO: 18920 - protein, 15 aa, synthetic construct
TSICPVALTTCPSSP

SEQ ID NO: 18921 - protein, 15 aa, synthetic construct
TSLGASSTSAGPWMS

SEQ ID NO: 18922 - protein, 15 aa, synthetic construct
TSLQGQETGGLSQES

SEQ ID NO: 18923 - protein, 15 aa, synthetic construct
TSPADAVCPGLGRDL

SEQ ID NO: 18924 - protein, 15 aa, synthetic construct
TSPAPEYEGSWRATS

SEQ ID NO: 18925 - protein, 15 aa, synthetic construct
TSPSPEITSWQACSL

SEQ ID NO: 18926 - protein, 15 aa, synthetic construct
TSPSPGTCTTPHSCP

SEQ ID NO: 18927 - protein, 15 aa, synthetic construct
TSPTPTPTHPSTPNM

SEQ ID NO: 18928 - protein, 15 aa, synthetic construct
TSRRRRGKSSWPSWI

SEQ ID NO: 18929 - protein, 15 aa, synthetic construct
TSSRCWASTSWSPCW

SEQ ID NO: 18930 - protein, 15 aa, synthetic construct
TSSSASAGTRASTPP

SEQ ID NO: 18931 - protein, 15 aa, synthetic construct
TTAAILVALQSTTVN

SEQ ID NO: 18932 - protein, 15 aa, synthetic construct
TTAPPAASCCAFARG

SEQ ID NO: 18933 - protein, 15 aa, synthetic construct
TTASLHSRTGPSWRA

SEQ ID NO: 18934 - protein, 15 aa, synthetic construct
TTASTTAATPEEERE

SEQ ID NO: 18935 - protein, 15 aa, synthetic construct
TTAVGLSATGDTRHL

SEQ ID NO: 18936 - protein, 15 aa, synthetic construct
TTELRPSGREVVGAA

SEQ ID NO: 18937 - protein, 15 aa, synthetic construct
TTGLRESCAARCVSQ

SEQ ID NO: 18938 - protein, 15 aa, synthetic construct
TTGQATAELSTITSC

SEQ ID NO: 18939 - protein, 15 aa, synthetic construct
TTGSLPSCSWCPLAS

SEQ ID NO: 18940 - protein, 15 aa, synthetic construct
TTGSRLPSTRCCPSC

SEQ ID NO: 18941 - protein, 15 aa, synthetic construct
TTPATPLTTSTTTTT

SEQ ID NO: 18942 - protein, 15 aa, synthetic construct
TTPSPTGRTLWAGGA

SEQ ID NO: 18943 - protein, 15 aa, synthetic construct
TTPTATTAASSTPTP

SEQ ID NO: 18944 - protein, 15 aa, synthetic construct
TTQSTRRPDTAPSWA

SEQ ID NO: 18945 - protein, 15 aa, synthetic construct
TTRATAPPPATWPSR

SEQ ID NO: 18946 - protein, 15 aa, synthetic construct
TTRGTAGRRGPPAWG

SEQ ID NO: 18947 - protein, 15 aa, synthetic construct
TTRSRRKPNTEPSLA

SEQ ID NO: 18948 - protein, 15 aa, synthetic construct
TTRTLGSGAPPARGS

SEQ ID NO: 18949 - protein, 15 aa, synthetic construct
TTRTQAQCSSKSTAG

SEQ ID NO: 18950 - protein, 15 aa, synthetic construct
TTRTRRSGGTSRAPP

SEQ ID NO: 18951 - protein, 15 aa, synthetic construct
TTRTRTRSPAPRRSS

SEQ ID NO: 18952 - protein, 15 aa, synthetic construct
TTRTSSTAPTPRPPP

SEQ ID NO: 18953 - protein, 15 aa, synthetic construct
TTSGPQTDQPKKHLT

SEQ ID NO: 18954 - protein, 15 aa, synthetic construct
TTSRRRSCAADPWAP

SEQ ID NO: 18955 - protein, 15 aa, synthetic construct
TTTATATTTTSAAAA

SEQ ID NO: 18956 - protein, 15 aa, synthetic construct
TTTSRTMIPWIWARW

SEQ ID NO: 18957 - protein, 15 aa, synthetic construct
TTTSSPTSSPTTTGA

SEQ ID NO: 18958 - protein, 15 aa, synthetic construct
TTTTIIISTTTATTT

SEQ ID NO: 18959 - protein, 15 aa, synthetic construct
TTTTTRPLCCATRRQ

SEQ ID NO: 18960 - protein, 15 aa, synthetic construct
TVAALGPQCHGHQLE

SEQ ID NO: 18961 - protein, 15 aa, synthetic construct
TVAGAGRPPATPAPR

SEQ ID NO: 18962 - protein, 15 aa, synthetic construct
TVALPVVFVPRGSPS

SEQ ID NO: 18963 - protein, 15 aa, synthetic construct
TVASLRTQISWCSGP

SEQ ID NO: 18964 - protein, 15 aa, synthetic construct
TVPAASVAVAATDPC

SEQ ID NO: 18965 - protein, 15 aa, synthetic construct
TVRGAELQGPAPPAA

SEQ ID NO: 18966 - protein, 15 aa, synthetic construct
TVSCKRTACTRTFPS

SEQ ID NO: 18967 - protein, 15 aa, synthetic construct
TVSPSTDPCSSSEKI

SEQ ID NO: 18968 - protein, 15 aa, synthetic construct
TVWGTRQGGGGPALR

SEQ ID NO: 18969 - protein, 15 aa, synthetic construct
TWRRSRRRRRSSRRR

SEQ ID NO: 18970 - protein, 15 aa, synthetic construct
TWSEDADPTSPERCS

SEQ ID NO: 18971 - protein, 14 aa, synthetic construct
VAAGAAVPAAEQRR

SEQ ID NO: 18972 - protein, 12 aa, synthetic construct
VAAPCSAPSQPL

SEQ ID NO: 18973 - protein, 12 aa, synthetic construct
VAAPSSTPSLPL

SEQ ID NO: 18974 - protein, 13 aa, synthetic construct
VAEESDLSGRLHP

SEQ ID NO: 18975 - protein, 14 aa, synthetic construct
VAGDRATLPRGAQH

SEQ ID NO: 18976 - protein, 12 aa, synthetic construct
VAGLHRDSPPGH

SEQ ID NO: 18977 - protein, 15 aa, synthetic construct
VALRRAAGPVCAEAA

SEQ ID NO: 18978 - protein, 14 aa, synthetic construct
VAPGSGAVAGLGVL

SEQ ID NO: 18979 - protein, 13 aa, synthetic construct
VAPVPPSQALQPQ

SEQ ID NO: 18980 - protein, 15 aa, synthetic construct
VAPWVSLPATALTCR

SEQ ID NO: 18981 - protein, 15 aa, synthetic construct
VARAPRSQRSPGRPR

SEQ ID NO: 18982 - protein, 14 aa, synthetic construct
VARGGEMAAENKPE

SEQ ID NO: 18983 - protein, 15 aa, synthetic construct
VARLRFFYKYGEGKR

SEQ ID NO: 18984 - protein, 15 aa, synthetic construct
VARLVSAQRARRAAD

SEQ ID NO: 18985 - protein, 15 aa, synthetic construct
VARNIGRGGPGGVMQ

SEQ ID NO: 18986 - protein, 15 aa, synthetic construct
VARRRERDSAAGTAL

SEQ ID NO: 18987 - protein, 15 aa, synthetic construct
VCCSASGGGGGGPVG

SEQ ID NO: 18988 - protein, 15 aa, synthetic construct
VCLLGAPAGRRGACE

SEQ ID NO: 18989 - protein, 14 aa, synthetic construct
VCSDASDRYANPHH

SEQ ID NO: 18990 - protein, 15 aa, synthetic construct
VCSLLVQPFLGTSGC

SEQ ID NO: 18991 - protein, 13 aa, synthetic construct
VDESKAHDSVLSV

SEQ ID NO: 18992 - protein, 14 aa, synthetic construct
VDGRRESGCGAERL

SEQ ID NO: 18993 - protein, 12 aa, synthetic construct
VDGRTKGRLDHG

SEQ ID NO: 18994 - protein, 13 aa, synthetic construct
VDPGAGNSEGIPH

SEQ ID NO: 18995 - protein, 14 aa, synthetic construct
VDPGPEEAHAGFQA

SEQ ID NO: 18996 - protein, 13 aa, synthetic construct
VEAGEPWHREQEN

SEQ ID NO: 18997 - protein, 13 aa, synthetic construct
VEHVEGARAGGQS

SEQ ID NO: 18998 - protein, 15 aa, synthetic construct
VELSSVSGASCLVAG

SEQ ID NO: 18999 - protein, 13 aa, synthetic construct
VESNGNCSNKSIY

SEQ ID NO: 19000 - protein, 15 aa, synthetic construct
VFHPLPVPALPPGPE

SEQ ID NO: 19001 - protein, 15 aa, synthetic construct
VFKKRFRIRRMDNHT

SEQ ID NO: 19002 - protein, 13 aa, synthetic construct
VFQCDRNCNLWKK

SEQ ID NO: 19003 - protein, 15 aa, synthetic construct
VFQTILFKIIIHHIL

SEQ ID NO: 19004 - protein, 15 aa, synthetic construct
VFSTFWWIQEDLLAN

SEQ ID NO: 19005 - protein, 15 aa, synthetic construct
VGARGRRRRGRLGRI

SEQ ID NO: 19006 - protein, 15 aa, synthetic construct
VGCAVFARNRQTNSV

SEQ ID NO: 19007 - protein, 14 aa, synthetic construct
VGEKRGGSGRVERQ

SEQ ID NO: 19008 - protein, 14 aa, synthetic construct
VGGGAEEAVLQGEP

SEQ ID NO: 19009 - protein, 14 aa, synthetic construct
VGGRAEEAVPQSQP

SEQ ID NO: 19010 - protein, 15 aa, synthetic construct
VGHPAASPVAAIPAA

SEQ ID NO: 19011 - protein, 15 aa, synthetic construct
VGLQRRPDSDKARDR

SEQ ID NO: 19012 - protein, 15 aa, synthetic construct
VGLQYPVAGANPRPA

SEQ ID NO: 19013 - protein, 15 aa, synthetic construct
VGLRAAGRAVHLRQH

SEQ ID NO: 19014 - protein, 13 aa, synthetic construct
VGPAGAATGLDCG

SEQ ID NO: 19015 - protein, 14 aa, synthetic construct
VGPEHPEVHNLCGP

SEQ ID NO: 19016 - protein, 14 aa, synthetic construct
VGPGLGGVGGGGRE

SEQ ID NO: 19017 - protein, 15 aa, synthetic construct
VGPHAGRSGGAGQGD

SEQ ID NO: 19018 - protein, 15 aa, synthetic construct
VGPPRVRAALAGRVP

SEQ ID NO: 19019 - protein, 15 aa, synthetic construct
VGPRKEHAPRPPSLS

SEQ ID NO: 19020 - protein, 15 aa, synthetic construct
VGPRRRDLAKHLSLL

SEQ ID NO: 19021 - protein, 15 aa, synthetic construct
VGPRRVLSPGRQRPD

SEQ ID NO: 19022 - protein, 15 aa, synthetic construct
VGPSRRLLPAGAEQD

SEQ ID NO: 19023 - protein, 12 aa, synthetic construct
VGQEGRIEENTS

SEQ ID NO: 19024 - protein, 15 aa, synthetic construct
VGRASARTVGPRCSR

SEQ ID NO: 19025 - protein, 15 aa, synthetic construct
VGRGGCPPPRVGRVG

SEQ ID NO: 19026 - protein, 15 aa, synthetic construct
VGRPGLGQEPPEGRR

SEQ ID NO: 19027 - protein, 14 aa, synthetic construct
VGRPGRELRAGGCQ

SEQ ID NO: 19028 - protein, 15 aa, synthetic construct
VGRRAGRRLRLSAVP

SEQ ID NO: 19029 - protein, 15 aa, synthetic construct
VGRRSVSPAAPEPRR

SEQ ID NO: 19030 - protein, 15 aa, synthetic construct
VGRRVPGIGAQAARA

SEQ ID NO: 19031 - protein, 15 aa, synthetic construct
VGRWCDSWPRREQRL

SEQ ID NO: 19032 - protein, 15 aa, synthetic construct
VGSPLRRRGSGLRER

SEQ ID NO: 19033 - protein, 14 aa, synthetic construct
VGTWQAGRQSSRQG

SEQ ID NO: 19034 - protein, 15 aa, synthetic construct
VHLGIIPQDSTSGFR

SEQ ID NO: 19035 - protein, 15 aa, synthetic construct
VHLWTKNGRQVEGGG

SEQ ID NO: 19036 - protein, 14 aa, synthetic construct
VHPGSAAPHAGLQE

SEQ ID NO: 19037 - protein, 15 aa, synthetic construct
VHRAEVQAEPPAWPR

SEQ ID NO: 19038 - protein, 15 aa, synthetic construct
VHRHQRLHRPGRLQR

SEQ ID NO: 19039 - protein, 15 aa, synthetic construct
VHRLPQRCGGPSRGG

SEQ ID NO: 19040 - protein, 15 aa, synthetic construct
VHRSGPSHCPEIPTQ

SEQ ID NO: 19041 - protein, 15 aa, synthetic construct
VHRSSPSLRPAAGPA

SEQ ID NO: 19042 - protein, 15 aa, synthetic construct
VHSPHQSAPVCVAER

SEQ ID NO: 19043 - protein, 15 aa, synthetic construct
VHWGLCQMPGGDPHS

SEQ ID NO: 19044 - protein, 15 aa, synthetic construct
VIRSLRHVPEPGALG

SEQ ID NO: 19045 - protein, 14 aa, synthetic construct
VKARPGRPGPQEAR

SEQ ID NO: 19046 - protein, 15 aa, synthetic construct
VKVSARRAAAAPAAA

SEQ ID NO: 19047 - protein, 15 aa, synthetic construct
VLFPVGACDPAPGVR

SEQ ID NO: 19048 - protein, 14 aa, synthetic construct
VLGSCPAHAVCLLH

SEQ ID NO: 19049 - protein, 15 aa, synthetic construct
VLLPRLWPLGRGFLH

SEQ ID NO: 19050 - protein, 15 aa, synthetic construct
VLPAARGRRGLPAGR

SEQ ID NO: 19051 - protein, 12 aa, synthetic construct
VLPGQEKHPPDH

SEQ ID NO: 19052 - protein, 12 aa, synthetic construct
VLPRQEEHPADH

SEQ ID NO: 19053 - protein, 14 aa, synthetic construct
VLQFHNASCYGRHP

SEQ ID NO: 19054 - protein, 14 aa, synthetic construct
VLQVHLHPAARRGG

SEQ ID NO: 19055 - protein, 14 aa, synthetic construct
VLRESDFSESNSKH

SEQ ID NO: 19056 - protein, 15 aa, synthetic construct
VLRKSHGTDPRAASR

SEQ ID NO: 19057 - protein, 15 aa, synthetic construct
VLRVQNQPLGEVLLA

SEQ ID NO: 19058 - protein, 12 aa, synthetic construct
VLSGEEKYSTHH

SEQ ID NO: 19059 - protein, 15 aa, synthetic construct
VLVWPSPWPQHVPNL

SEQ ID NO: 19060 - protein, 12 aa, synthetic construct
VNQIRDQERAGQ

SEQ ID NO: 19061 - protein, 15 aa, synthetic construct
VPAAAAAEEPDRAQP

SEQ ID NO: 19062 - protein, 15 aa, synthetic construct
VPAAASPAAVAPAAV

SEQ ID NO: 19063 - protein, 15 aa, synthetic construct
VPAAVAGPASHGAGR

SEQ ID NO: 19064 - protein, 15 aa, synthetic construct
VPACGRQEEAQDPRA

SEQ ID NO: 19065 - protein, 15 aa, synthetic construct
VPACSGPQSQTGFSQ

SEQ ID NO: 19066 - protein, 15 aa, synthetic construct
VPAEGVGAAGAVGAG

SEQ ID NO: 19067 - protein, 15 aa, synthetic construct
VPAGNTGLRRRPSQP

SEQ ID NO: 19068 - protein, 15 aa, synthetic construct
VPAGSGNAPAPPGSC

SEQ ID NO: 19069 - protein, 15 aa, synthetic construct
VPAHVSSDCPGCRPR

SEQ ID NO: 19070 - protein, 12 aa, synthetic construct
VPAKAKQTPADQ

SEQ ID NO: 19071 - protein, 15 aa, synthetic construct
VPAPGVHSDPTSRGQ

SEQ ID NO: 19072 - protein, 15 aa, synthetic construct
VPAQEVALQELQPEP

SEQ ID NO: 19073 - protein, 15 aa, synthetic construct
VPARGAPGLLLPRGW

SEQ ID NO: 19074 - protein, 12 aa, synthetic construct
VPARQGRGRRMF

SEQ ID NO: 19075 - protein, 12 aa, synthetic construct
VPARQTEGDLQV

SEQ ID NO: 19076 - protein, 14 aa, synthetic construct
VPAVPLTLPGAVPT

SEQ ID NO: 19077 - protein, 15 aa, synthetic construct
VPDNEESRSCPFSIH

SEQ ID NO: 19078 - protein, 15 aa, synthetic construct
VPDQNAEGPRDPLLH

SEQ ID NO: 19079 - protein, 15 aa, synthetic construct
VPDTGRRDAQPTRAN

SEQ ID NO: 19080 - protein, 15 aa, synthetic construct
VPEKGEHLHHSQVRQ

SEQ ID NO: 19081 - protein, 15 aa, synthetic construct
VPERPLLGHPLLRAD

SEQ ID NO: 19082 - protein, 15 aa, synthetic construct
VPETRRREPCGGDRR

SEQ ID NO: 19083 - protein, 15 aa, synthetic construct
VPFCPPLRWAEPRAE

SEQ ID NO: 19084 - protein, 15 aa, synthetic construct
VPGAAGQRGADPAPE

SEQ ID NO: 19085 - protein, 15 aa, synthetic construct
VPGAALGASCLGRER

SEQ ID NO: 19086 - protein, 15 aa, synthetic construct
VPGAGASGRGGPARL

SEQ ID NO: 19087 - protein, 15 aa, synthetic construct
VPGARGGEPAHGEHL

SEQ ID NO: 19088 - protein, 15 aa, synthetic construct
VPGARVLCEEEAVRW

SEQ ID NO: 19089 - protein, 15 aa, synthetic construct
VPGASAPGGPSPPSP

SEQ ID NO: 19090 - protein, 15 aa, synthetic construct
VPGCGCLGAARRCCA

SEQ ID NO: 19091 - protein, 15 aa, synthetic construct
VPGLEQLVGLAAAGG

SEQ ID NO: 19092 - protein, 15 aa, synthetic construct
VPGLPGEVREILQMC

SEQ ID NO: 19093 - protein, 15 aa, synthetic construct
VPGNRQARGPCPKSA

SEQ ID NO: 19094 - protein, 15 aa, synthetic construct
VPGTGGGNATWAAPR

SEQ ID NO: 19095 - protein, 15 aa, synthetic construct
VPGTLRPARDAAAAA

SEQ ID NO: 19096 - protein, 15 aa, synthetic construct
VPGTRRQHQGQRSRR

SEQ ID NO: 19097 - protein, 15 aa, synthetic construct
VPHGGAGHERFHVRL

SEQ ID NO: 19098 - protein, 15 aa, synthetic construct
VPHLPPTKETSPAAS

SEQ ID NO: 19099 - protein, 14 aa, synthetic construct
VPHPGRLPHHLPGE

SEQ ID NO: 19100 - protein, 15 aa, synthetic construct
VPHVLHEPSLPAERR

SEQ ID NO: 19101 - protein, 15 aa, synthetic construct
VPLGAELPVSAGGGG

SEQ ID NO: 19102 - protein, 12 aa, synthetic construct
VPLGPRVEEGGG

SEQ ID NO: 19103 - protein, 15 aa, synthetic construct
VPLHLLGGDNSSLPF

SEQ ID NO: 19104 - protein, 13 aa, synthetic construct
VPLPLLHFSEDMQ

SEQ ID NO: 19105 - protein, 15 aa, synthetic construct
VPNGLGWPGPGGRVV

SEQ ID NO: 19106 - protein, 15 aa, synthetic construct
VPPGAAVGRGQLCAH

SEQ ID NO: 19107 - protein, 15 aa, synthetic construct
VPPLLVPVPIPRGHQ

SEQ ID NO: 19108 - protein, 15 aa, synthetic construct
VPPLYAACLGSPQPP

SEQ ID NO: 19109 - protein, 15 aa, synthetic construct
VPPQGSQRGQASGRM

SEQ ID NO: 19110 - protein, 15 aa, synthetic construct
VPQGKRECGVHAAEP

SEQ ID NO: 19111 - protein, 15 aa, synthetic construct
VPQPAGPGHPPGADP

SEQ ID NO: 19112 - protein, 14 aa, synthetic construct
VPQQQEEKGVERGE

SEQ ID NO: 19113 - protein, 15 aa, synthetic construct
VPRFGALPCERLRSP

SEQ ID NO: 19114 - protein, 15 aa, synthetic construct
VPRGGRRGRAGRAPL

SEQ ID NO: 19115 - protein, 15 aa, synthetic construct
VPRGIARGHNARCAA

SEQ ID NO: 19116 - protein, 15 aa, synthetic construct
VPRTRRAAAGWQPVR

SEQ ID NO: 19117 - protein, 15 aa, synthetic construct
VPRVLLGRRRDRPPP

SEQ ID NO: 19118 - protein, 15 aa, synthetic construct
VPSAGEGECWLQRLW

SEQ ID NO: 19119 - protein, 12 aa, synthetic construct
VPSGGSGAAPAG

SEQ ID NO: 19120 - protein, 15 aa, synthetic construct
VPSGRAAGAGCALPG

SEQ ID NO: 19121 - protein, 15 aa, synthetic construct
VPSLRPGLPDLEAPL

SEQ ID NO: 19122 - protein, 15 aa, synthetic construct
VPSSTALHPQSFIHA

SEQ ID NO: 19123 - protein, 15 aa, synthetic construct
VPSTSAPRALASPRA

SEQ ID NO: 19124 - protein, 14 aa, synthetic construct
VPVLLGHRAFPSQP

SEQ ID NO: 19125 - protein, 15 aa, synthetic construct
VPWPGRAPDIHPSSQ

SEQ ID NO: 19126 - protein, 12 aa, synthetic construct
VQAETEQPPADQ

SEQ ID NO: 19127 - protein, 14 aa, synthetic construct
VQLLSHEETQCVGL

SEQ ID NO: 19128 - protein, 15 aa, synthetic construct
VQRRGRRQRAGLRSD

SEQ ID NO: 19129 - protein, 15 aa, synthetic construct
VQRRPVRDHPGRPGA

SEQ ID NO: 19130 - protein, 15 aa, synthetic construct
VQRRVAGAGGAVREP

SEQ ID NO: 19131 - protein, 15 aa, synthetic construct
VRAAAAGRRARSLPG

SEQ ID NO: 19132 - protein, 15 aa, synthetic construct
VRAARLPRLPGGAER

SEQ ID NO: 19133 - protein, 15 aa, synthetic construct
VRAATSPASAAASVS

SEQ ID NO: 19134 - protein, 15 aa, synthetic construct
VRALAVEGRPGHPLG

SEQ ID NO: 19135 - protein, 15 aa, synthetic construct
VRAPRPAAGAAGDPP

SEQ ID NO: 19136 - protein, 15 aa, synthetic construct
VRAQRRQRQREGQEE

SEQ ID NO: 19137 - protein, 15 aa, synthetic construct
VRARGPDGAAPVGHR

SEQ ID NO: 19138 - protein, 15 aa, synthetic construct
VRASGRPQHWAAHRC

SEQ ID NO: 19139 - protein, 15 aa, synthetic construct
VRATNGPEGFNAHKE

SEQ ID NO: 19140 - protein, 15 aa, synthetic construct
VRAVRPSRGPRATWA

SEQ ID NO: 19141 - protein, 13 aa, synthetic construct
VRAWVPEAPLRAC

SEQ ID NO: 19142 - protein, 15 aa, synthetic construct
VRDCSCRSRCRASCG

SEQ ID NO: 19143 - protein, 15 aa, synthetic construct
VRDPALQRRQDGPLR

SEQ ID NO: 19144 - protein, 14 aa, synthetic construct
VRELPPGQGREHVP

SEQ ID NO: 19145 - protein, 12 aa, synthetic construct
VRELRRPGGGVK

SEQ ID NO: 19146 - protein, 15 aa, synthetic construct
VRETRQNGRSMPLGR

SEQ ID NO: 19147 - protein, 15 aa, synthetic construct
VRFCERGSERKRVLP

SEQ ID NO: 19148 - protein, 15 aa, synthetic construct
VRFLPGLGRPRFSTR

SEQ ID NO: 19149 - protein, 15 aa, synthetic construct
VRFPEGRRRPPARPG

SEQ ID NO: 19150 - protein, 15 aa, synthetic construct
VRGAWGPGAKRLSDC

SEQ ID NO: 19151 - protein, 12 aa, synthetic construct
VRGERDTSWSWR

SEQ ID NO: 19152 - protein, 15 aa, synthetic construct
VRGLERPALVHQQGR

SEQ ID NO: 19153 - protein, 15 aa, synthetic construct
VRGRRLRESAEEIQA

SEQ ID NO: 19154 - protein, 15 aa, synthetic construct
VRHQQPRGGEEAAGE

SEQ ID NO: 19155 - protein, 15 aa, synthetic construct
VRIRPAAGGGAADLR

SEQ ID NO: 19156 - protein, 15 aa, synthetic construct
VRKTAAPSPRPLPSR

SEQ ID NO: 19157 - protein, 15 aa, synthetic construct
VRLGAGSEHRGAGGA

SEQ ID NO: 19158 - protein, 15 aa, synthetic construct
VRLLPLCAERQEDHE

SEQ ID NO: 19159 - protein, 15 aa, synthetic construct
VRLLQRPELWQPRLP

SEQ ID NO: 19160 - protein, 15 aa, synthetic construct
VRLPPRLRCRLSHRS

SEQ ID NO: 19161 - protein, 15 aa, synthetic construct
VRLQKREPPGLRGAE

SEQ ID NO: 19162 - protein, 15 aa, synthetic construct
VRLQSWRRARRAGPV

SEQ ID NO: 19163 - protein, 15 aa, synthetic construct
VRLVGPELRLGPGPR

SEQ ID NO: 19164 - protein, 15 aa, synthetic construct
VRLYGNVCPGSATAV

SEQ ID NO: 19165 - protein, 15 aa, synthetic construct
VRPAGCFGPIGRGLG

SEQ ID NO: 19166 - protein, 15 aa, synthetic construct
VRPALSLPPPPPSLQ

SEQ ID NO: 19167 - protein, 15 aa, synthetic construct
VRPAPHALGHDLGLL

SEQ ID NO: 19168 - protein, 15 aa, synthetic construct
VRPDAAAAAGLDRLG

SEQ ID NO: 19169 - protein, 15 aa, synthetic construct
VRPGGGGEAFAADPE

SEQ ID NO: 19170 - protein, 15 aa, synthetic construct
VRPGGNGGHRPDPPL

SEQ ID NO: 19171 - protein, 15 aa, synthetic construct
VRPLHLDLPHGGAAG

SEQ ID NO: 19172 - protein, 15 aa, synthetic construct
VRPPAAGPLAAAPAA

SEQ ID NO: 19173 - protein, 15 aa, synthetic construct
VRPPLPGLPGLRHSP

SEQ ID NO: 19174 - protein, 15 aa, synthetic construct
VRPPRAAQPQAPSAG

SEQ ID NO: 19175 - protein, 15 aa, synthetic construct
VRPPSNFTGSSPWME

SEQ ID NO: 19176 - protein, 15 aa, synthetic construct
VRPQRLRPAAPRGCC

SEQ ID NO: 19177 - protein, 15 aa, synthetic construct
VRPRVPGAGASGTRA

SEQ ID NO: 19178 - protein, 15 aa, synthetic construct
VRPSSSVPLASSWAS

SEQ ID NO: 19179 - protein, 15 aa, synthetic construct
VRQRKGRKRLRQRGR

SEQ ID NO: 19180 - protein, 15 aa, synthetic construct
VRQSQRGNCGSTDMQ

SEQ ID NO: 19181 - protein, 15 aa, synthetic construct
VRRAAGRARGPGRVT

SEQ ID NO: 19182 - protein, 15 aa, synthetic construct
VRREPIPSLYAGSVR

SEQ ID NO: 19183 - protein, 15 aa, synthetic construct
VRRERGPRQTREEKR

SEQ ID NO: 19184 - protein, 15 aa, synthetic construct
VRRERGSRGSDRGRR

SEQ ID NO: 19185 - protein, 15 aa, synthetic construct
VRRGLGHHFLREVSN

SEQ ID NO: 19186 - protein, 15 aa, synthetic construct
VRRGRFWESTEKIQV

SEQ ID NO: 19187 - protein, 15 aa, synthetic construct
VRRGRRKEAACGPAG

SEQ ID NO: 19188 - protein, 15 aa, synthetic construct
VRRGSEAERRLLAGR

SEQ ID NO: 19189 - protein, 15 aa, synthetic construct
VRRGWPGGWPGGGGG

SEQ ID NO: 19190 - protein, 15 aa, synthetic construct
VRRHSEHHKPARELA

SEQ ID NO: 19191 - protein, 15 aa, synthetic construct
VRRPGAWGPGSPGHG

SEQ ID NO: 19192 - protein, 15 aa, synthetic construct
VRRPRLPPSEGAQGR

SEQ ID NO: 19193 - protein, 15 aa, synthetic construct
VRRRAAPPAARGSLP

SEQ ID NO: 19194 - protein, 15 aa, synthetic construct
VRRRATSPSPAPARR

SEQ ID NO: 19195 - protein, 15 aa, synthetic construct
VRRRGGRRGRPGRGA

SEQ ID NO: 19196 - protein, 15 aa, synthetic construct
VRRRRLGGQPHAAAA

SEQ ID NO: 19197 - protein, 15 aa, synthetic construct
VRRRRTAASSHPAPE

SEQ ID NO: 19198 - protein, 15 aa, synthetic construct
VRRSLPDPVPLLRGA

SEQ ID NO: 19199 - protein, 15 aa, synthetic construct
VRSFGANYQGQGWEK

SEQ ID NO: 19200 - protein, 15 aa, synthetic construct
VRSQSAGAVAAAGRG

SEQ ID NO: 19201 - protein, 15 aa, synthetic construct
VRSRCAPSSGAVALK

SEQ ID NO: 19202 - protein, 15 aa, synthetic construct
VRVAAAGGQGRRSGS

SEQ ID NO: 19203 - protein, 15 aa, synthetic construct
VRVPARVPRRRRARD

SEQ ID NO: 19204 - protein, 15 aa, synthetic construct
VRVRAQGRAEVPGVH

SEQ ID NO: 19205 - protein, 15 aa, synthetic construct
VRWKKSQKLANLGKK

SEQ ID NO: 19206 - protein, 15 aa, synthetic construct
VSAPPPFSLPFLPAL

SEQ ID NO: 19207 - protein, 12 aa, synthetic construct
VSGTARAQPGCE

SEQ ID NO: 19208 - protein, 14 aa, synthetic construct
VSLDLAGHWPNECL

SEQ ID NO: 19209 - protein, 15 aa, synthetic construct
VSLLRAFLLRRRKKK

SEQ ID NO: 19210 - protein, 14 aa, synthetic construct
VSPVKCVLPERGQS

SEQ ID NO: 19211 - protein, 12 aa, synthetic construct
VSQFQNDYFSKP

SEQ ID NO: 19212 - protein, 15 aa, synthetic construct
VSRTGEGSHFAEESS

SEQ ID NO: 19213 - protein, 14 aa, synthetic construct
VSSKITDFHHYHGV

SEQ ID NO: 19214 - protein, 14 aa, synthetic construct
VSTLRGCSPHPGAP

SEQ ID NO: 19215 - protein, 13 aa, synthetic construct
VSTPSPAPLESHF

SEQ ID NO: 19216 - protein, 15 aa, synthetic construct
VTGSGVYSAHPQAFP

SEQ ID NO: 19217 - protein, 14 aa, synthetic construct
VTGVQNGRVSPRPP

SEQ ID NO: 19218 - protein, 13 aa, synthetic construct
VVAALFSGDCHSC

SEQ ID NO: 19219 - protein, 15 aa, synthetic construct
VVDLAFLLPHNNLKG

SEQ ID NO: 19220 - protein, 14 aa, synthetic construct
VVESSQLAGMVPLA

SEQ ID NO: 19221 - protein, 12 aa, synthetic construct
VVPGQEEHPAHH

SEQ ID NO: 19222 - protein, 14 aa, synthetic construct
VVPGSVPRPVPGGD

SEQ ID NO: 19223 - protein, 15 aa, synthetic construct
VVPRAAPAPAPAPAT

SEQ ID NO: 19224 - protein, 14 aa, synthetic construct
VVPSASGSSCLKRS

SEQ ID NO: 19225 - protein, 15 aa, synthetic construct
VVRGRGYSAAGRDSG

SEQ ID NO: 19226 - protein, 15 aa, synthetic construct
VVRHPCSAGDWRQQG

SEQ ID NO: 19227 - protein, 15 aa, synthetic construct
VVRPFLRSRTGPSYY

SEQ ID NO: 19228 - protein, 15 aa, synthetic construct
VVRRQWEGAGLGGRG

SEQ ID NO: 19229 - protein, 14 aa, synthetic construct
VWEANAVRRSRSAL

SEQ ID NO: 19230 - protein, 14 aa, synthetic construct
VWPEAQCLLWGLRM

SEQ ID NO: 19231 - protein, 15 aa, synthetic construct
VWPRQRREGSWQRRR

SEQ ID NO: 19232 - protein, 14 aa, synthetic construct
VWTREAGRKSTRQV

SEQ ID NO: 19233 - protein, 12 aa, synthetic construct
VWTWQAGRQSPR

SEQ ID NO: 19234 - protein, 15 aa, synthetic construct
VYGHVHRERAGLLLP

SEQ ID NO: 19235 - protein, 15 aa, synthetic construct
VYHRDAKIHMSAGVS

SEQ ID NO: 19236 - protein, 15 aa, synthetic construct
VYLRDGAPGAGRGPR

SEQ ID NO: 19237 - protein, 15 aa, synthetic construct
VYPQCGREDPRRQRK

SEQ ID NO: 19238 - protein, 15 aa, synthetic construct
VYRPVTQIRGLRGVR

SEQ ID NO: 19239 - protein, 15 aa, synthetic construct
VYSRSDGEPQGGTHL

SEQ ID NO: 19240 - protein, 15 aa, synthetic construct
WAAAAASNAYSSASS

SEQ ID NO: 19241 - protein, 15 aa, synthetic construct
WAAAGAGRMPSSPAT

SEQ ID NO: 19242 - protein, 15 aa, synthetic construct
WAAAPDAARSSASAR

SEQ ID NO: 19243 - protein, 13 aa, synthetic construct
WAAEELEKDQAKP

SEQ ID NO: 19244 - protein, 15 aa, synthetic construct
WAAEPERRLRSPAGG

SEQ ID NO: 19245 - protein, 14 aa, synthetic construct
WAAGDSCWCGSEPR

SEQ ID NO: 19246 - protein, 15 aa, synthetic construct
WAAGPDGDGGGSAGV

SEQ ID NO: 19247 - protein, 15 aa, synthetic construct
WAALAALEAVAPAVG

SEQ ID NO: 19248 - protein, 13 aa, synthetic construct
WAAPPASMSRRAA

SEQ ID NO: 19249 - protein, 15 aa, synthetic construct
WAAPPKRAGLPGRWA

SEQ ID NO: 19250 - protein, 15 aa, synthetic construct
WAAPRARQWRRPPQR

SEQ ID NO: 19251 - protein, 15 aa, synthetic construct
WAARAQAPPGAAGSG

SEQ ID NO: 19252 - protein, 15 aa, synthetic construct
WAARCRSRPRKWCPV

SEQ ID NO: 19253 - protein, 15 aa, synthetic construct
WAASSGAPRCGGCAA

SEQ ID NO: 19254 - protein, 15 aa, synthetic construct
WAAVAALEAVAPAVG

SEQ ID NO: 19255 - protein, 15 aa, synthetic construct
WAAVAAPEAVAPAVE

SEQ ID NO: 19256 - protein, 15 aa, synthetic construct
WAAVAAPEAVAPAVG

SEQ ID NO: 19257 - protein, 15 aa, synthetic construct
WAAVAVPKAVAPAVG

SEQ ID NO: 19258 - protein, 15 aa, synthetic construct
WACAPSSPWALLENP

SEQ ID NO: 19259 - protein, 15 aa, synthetic construct
WADGRGRGSVGERKG

SEQ ID NO: 19260 - protein, 15 aa, synthetic construct
WAEAGRLRHRPQRLG

SEQ ID NO: 19261 - protein, 15 aa, synthetic construct
WAGGAAAAARDVWTC

SEQ ID NO: 19262 - protein, 15 aa, synthetic construct
WAGGAQPPETVVHFG

SEQ ID NO: 19263 - protein, 15 aa, synthetic construct
WAGREEGTREALSSS

SEQ ID NO: 19264 - protein, 15 aa, synthetic construct
WAGRERPSELALGGS

SEQ ID NO: 19265 - protein, 15 aa, synthetic construct
WAGRGPEPTPPRAPG

SEQ ID NO: 19266 - protein, 15 aa, synthetic construct
WAHQALTASKLGTGD

SEQ ID NO: 19267 - protein, 15 aa, synthetic construct
WAIPAVSAPRWSGMV

SEQ ID NO: 19268 - protein, 15 aa, synthetic construct
WALAMGLGEQRGSGR

SEQ ID NO: 19269 - protein, 15 aa, synthetic construct
WALPRLQPLLHDHPG

SEQ ID NO: 19270 - protein, 15 aa, synthetic construct
WANAGGRARRRAARA

SEQ ID NO: 19271 - protein, 15 aa, synthetic construct
WAPADAMKARSLAAP

SEQ ID NO: 19272 - protein, 15 aa, synthetic construct
WAPAPAAARSSSSAL

SEQ ID NO: 19273 - protein, 13 aa, synthetic construct
WAPAPAARPAPHA

SEQ ID NO: 19274 - protein, 13 aa, synthetic construct
WAPATTSTTTSLK

SEQ ID NO: 19275 - protein, 15 aa, synthetic construct
WAPGTSAAAEREFPR

SEQ ID NO: 19276 - protein, 15 aa, synthetic construct
WAPPRPWRVPPSRPT

SEQ ID NO: 19277 - protein, 15 aa, synthetic construct
WAPRRTPSRRAPHRY

SEQ ID NO: 19278 - protein, 15 aa, synthetic construct
WAQASAPVAAATRGR

SEQ ID NO: 19279 - protein, 15 aa, synthetic construct
WAQLLIWEHWPQEDA

SEQ ID NO: 19280 - protein, 15 aa, synthetic construct
WAQLLSGVSPQELGG

SEQ ID NO: 19281 - protein, 15 aa, synthetic construct
WAQPRAGSELRLQPR

SEQ ID NO: 19282 - protein, 13 aa, synthetic construct
WAQPRQMDEKTKK

SEQ ID NO: 19283 - protein, 15 aa, synthetic construct
WARSTRSTSRTNTST

SEQ ID NO: 19284 - protein, 12 aa, synthetic construct
WARTMANSTAVR

SEQ ID NO: 19285 - protein, 15 aa, synthetic construct
WARVCRSSCASSAAR

SEQ ID NO: 19286 - protein, 15 aa, synthetic construct
WARVGLLQDFPASSS

SEQ ID NO: 19287 - protein, 15 aa, synthetic construct
WASFAAFLSQEMKEK

SEQ ID NO: 19288 - protein, 15 aa, synthetic construct
WASGRLNRWGEALKL

SEQ ID NO: 19289 - protein, 15 aa, synthetic construct
WASSQDPSPTPPGMS

SEQ ID NO: 19290 - protein, 15 aa, synthetic construct
WATARAAATSSGSTP

SEQ ID NO: 19291 - protein, 15 aa, synthetic construct
WATRRAWKGKGSPKG

SEQ ID NO: 19292 - protein, 15 aa, synthetic construct
WATSGPGSDQLVSAS

SEQ ID NO: 19293 - protein, 15 aa, synthetic construct
WATSPPASGAPGTGS

SEQ ID NO: 19294 - protein, 15 aa, synthetic construct
WAVPRASTFPSAWWP

SEQ ID NO: 19295 - protein, 12 aa, synthetic construct
WAWRSRPSPPET

SEQ ID NO: 19296 - protein, 15 aa, synthetic construct
WCFSREMLPTAPTAP

SEQ ID NO: 19297 - protein, 15 aa, synthetic construct
WCGARDPAGQPGMEP

SEQ ID NO: 19298 - protein, 12 aa, synthetic construct
WCGSLSSTSRSC

SEQ ID NO: 19299 - protein, 15 aa, synthetic construct
WCSKAGHVRSWRCLL

SEQ ID NO: 19300 - protein, 15 aa, synthetic construct
WDACPTASAGTGTAS

SEQ ID NO: 19301 - protein, 15 aa, synthetic construct
WDAVCAACRSKRSST

SEQ ID NO: 19302 - protein, 15 aa, synthetic construct
WDFGDKASRPPRALE

SEQ ID NO: 19303 - protein, 15 aa, synthetic construct
WDGEGVEAAPRAHPS

SEQ ID NO: 19304 - protein, 15 aa, synthetic construct
WDGSAPSSALPCPSG

SEQ ID NO: 19305 - protein, 15 aa, synthetic construct
WDPSQPLPALSTSPG

SEQ ID NO: 19306 - protein, 15 aa, synthetic construct
WDRCGACVVAPLGAG

SEQ ID NO: 19307 - protein, 15 aa, synthetic construct
WDRVSQASARQGLLD

SEQ ID NO: 19308 - protein, 15 aa, synthetic construct
WDSAREVLGPRCSWG

SEQ ID NO: 19309 - protein, 15 aa, synthetic construct
WEAALSALPGGGSRP

SEQ ID NO: 19310 - protein, 12 aa, synthetic construct
WEAGRRRGTGEP

SEQ ID NO: 19311 - protein, 15 aa, synthetic construct
WEAQLVGLGGRMRGR

SEQ ID NO: 19312 - protein, 15 aa, synthetic construct
WEARPPPPPQPPPRT

SEQ ID NO: 19313 - protein, 15 aa, synthetic construct
WEDTALHQKKLCPLS

SEQ ID NO: 19314 - protein, 15 aa, synthetic construct
WEGAARRGAGPARGR

SEQ ID NO: 19315 - protein, 14 aa, synthetic construct
WEGRSPCSQPQPAT

SEQ ID NO: 19316 - protein, 15 aa, synthetic construct
WEGSEAWHSQWEGPG

SEQ ID NO: 19317 - protein, 15 aa, synthetic construct
WEIAPDGGAQQGRGE

SEQ ID NO: 19318 - protein, 12 aa, synthetic construct
WEISQPWASAPG

SEQ ID NO: 19319 - protein, 13 aa, synthetic construct
WEKLAPAAAPKPG

SEQ ID NO: 19320 - protein, 15 aa, synthetic construct
WEKNHDGKAQPLAMQ

SEQ ID NO: 19321 - protein, 15 aa, synthetic construct
WEKPRDGRAAGRAPS

SEQ ID NO: 19322 - protein, 15 aa, synthetic construct
WELPQPCSPQPLPKP

SEQ ID NO: 19323 - protein, 15 aa, synthetic construct
WELRGDPRPDPAGCL

SEQ ID NO: 19324 - protein, 12 aa, synthetic construct
WELRGERSTGPE

SEQ ID NO: 19325 - protein, 15 aa, synthetic construct
WELRTRKWRPGLAAV

SEQ ID NO: 19326 - protein, 13 aa, synthetic construct
WELYKRQEKRQML

SEQ ID NO: 19327 - protein, 15 aa, synthetic construct
WEPLATPSSRGDLAG

SEQ ID NO: 19328 - protein, 15 aa, synthetic construct
WEPPSGQSGRPENSS

SEQ ID NO: 19329 - protein, 15 aa, synthetic construct
WEPSGSCGSCRCCFP

SEQ ID NO: 19330 - protein, 15 aa, synthetic construct
WEPSQPLPAHSASNG

SEQ ID NO: 19331 - protein, 15 aa, synthetic construct
WEQGCEVSPCESPDP

SEQ ID NO: 19332 - protein, 15 aa, synthetic construct
WEREMKTPISTAPPS

SEQ ID NO: 19333 - protein, 15 aa, synthetic construct
WEREMKTPISTVPPS

SEQ ID NO: 19334 - protein, 14 aa, synthetic construct
WERMKQVYLTRLCK

SEQ ID NO: 19335 - protein, 12 aa, synthetic construct
WERPKTHRWMPW

SEQ ID NO: 19336 - protein, 15 aa, synthetic construct
WERSSPNTSATGPWK

SEQ ID NO: 19337 - protein, 15 aa, synthetic construct
WESPSFTDGSQSGIP

SEQ ID NO: 19338 - protein, 15 aa, synthetic construct
WESRRSSAGSAASTR

SEQ ID NO: 19339 - protein, 15 aa, synthetic construct
WESSGGRRSRAGSPP

SEQ ID NO: 19340 - protein, 15 aa, synthetic construct
WETLGASAAKRPACR

SEQ ID NO: 19341 - protein, 15 aa, synthetic construct
WETNLVPPGDPLSHL

SEQ ID NO: 19342 - protein, 15 aa, synthetic construct
WEVAVPLSQGPGRAA

SEQ ID NO: 19343 - protein, 15 aa, synthetic construct
WEWRAAPSASSTCSS

SEQ ID NO: 19344 - protein, 15 aa, synthetic construct
WFQKEVQQEETLQEW

SEQ ID NO: 19345 - protein, 15 aa, synthetic construct
WGAGPGSPAPGPHRG

SEQ ID NO: 19346 - protein, 15 aa, synthetic construct
WGAPDWQPCSCLSSS

SEQ ID NO: 19347 - protein, 15 aa, synthetic construct
WGATPPLGSREPHQL

SEQ ID NO: 19348 - protein, 15 aa, synthetic construct
WGCGRQETAAAGPGS

SEQ ID NO: 19349 - protein, 15 aa, synthetic construct
WGCVQEERWAGPARV

SEQ ID NO: 19350 - protein, 15 aa, synthetic construct
WGEIRLPSQSSSYWD

SEQ ID NO: 19351 - protein, 15 aa, synthetic construct
WGERRPPQAAAEGRA

SEQ ID NO: 19352 - protein, 13 aa, synthetic construct
WGESSGTRMTRPT

SEQ ID NO: 19353 - protein, 15 aa, synthetic construct
WGFLLSLPSAPTPCG

SEQ ID NO: 19354 - protein, 15 aa, synthetic construct
WGGAAAGGACWRPPV

SEQ ID NO: 19355 - protein, 15 aa, synthetic construct
WGGARAGFRAGAETP

SEQ ID NO: 19356 - protein, 15 aa, synthetic construct
WGGGGSGWTPRLGPG

SEQ ID NO: 19357 - protein, 15 aa, synthetic construct
WGGGRGVGGSSNSSG

SEQ ID NO: 19358 - protein, 15 aa, synthetic construct
WGGPELGAPGSYRPA

SEQ ID NO: 19359 - protein, 15 aa, synthetic construct
WGGPGSRAWDRGAGP

SEQ ID NO: 19360 - protein, 15 aa, synthetic construct
WGISQPPLLPRMAVV

SEQ ID NO: 19361 - protein, 12 aa, synthetic construct
WGKDARAELAPQ

SEQ ID NO: 19362 - protein, 15 aa, synthetic construct
WGKWAEQDLHKKMFC

SEQ ID NO: 19363 - protein, 15 aa, synthetic construct
WGLGPCCGLPCCSPG

SEQ ID NO: 19364 - protein, 15 aa, synthetic construct
WGLLTHGDTTGWESC

SEQ ID NO: 19365 - protein, 15 aa, synthetic construct
WGLPGPSTRRLPSCC

SEQ ID NO: 19366 - protein, 15 aa, synthetic construct
WGLQLRQRRRRRRRR

SEQ ID NO: 19367 - protein, 15 aa, synthetic construct
WGLVPGPPSEMLPRS

SEQ ID NO: 19368 - protein, 15 aa, synthetic construct
WGMPRRPEPRVRRPG

SEQ ID NO: 19369 - protein, 15 aa, synthetic construct
WGPGAGNCAGPSPCS

SEQ ID NO: 19370 - protein, 15 aa, synthetic construct
WGPGSASGCCCCPPP

SEQ ID NO: 19371 - protein, 15 aa, synthetic construct
WGPPPAGAPTWGPRP

SEQ ID NO: 19372 - protein, 15 aa, synthetic construct
WGPPQLVPTENASPG

SEQ ID NO: 19373 - protein, 15 aa, synthetic construct
WGPPQPLPTENASPG

SEQ ID NO: 19374 - protein, 15 aa, synthetic construct
WGPRALPAALGPAGL

SEQ ID NO: 19375 - protein, 15 aa, synthetic construct
WGPRAWCWASWCRSG

SEQ ID NO: 19376 - protein, 15 aa, synthetic construct
WGPRHSHSSLGNGKC

SEQ ID NO: 19377 - protein, 15 aa, synthetic construct
WGPRIQGTWEPASQP

SEQ ID NO: 19378 - protein, 15 aa, synthetic construct
WGPSQPLPADGASPG

SEQ ID NO: 19379 - protein, 15 aa, synthetic construct
WGPSQPLPAHSASPG

SEQ ID NO: 19380 - protein, 15 aa, synthetic construct
WGPSQPLPAQSTSNG

SEQ ID NO: 19381 - protein, 12 aa, synthetic construct
WGPWRCPPGCSP

SEQ ID NO: 19382 - protein, 15 aa, synthetic construct
WGQRRKSRGNCCASS

SEQ ID NO: 19383 - protein, 15 aa, synthetic construct
WGRGPQGQDPGPWRP

SEQ ID NO: 19384 - protein, 15 aa, synthetic construct
WGRIQSFGFGEIEGL

SEQ ID NO: 19385 - protein, 15 aa, synthetic construct
WGRRPAPRPRSGTGT

SEQ ID NO: 19386 - protein, 15 aa, synthetic construct
WGRRRCRSSDRGCGP

SEQ ID NO: 19387 - protein, 15 aa, synthetic construct
WGRRRRKRIALSLWA

SEQ ID NO: 19388 - protein, 15 aa, synthetic construct
WGRRRSPPPSAPRAA

SEQ ID NO: 19389 - protein, 15 aa, synthetic construct
WGRRSRCCCCYCCCC

SEQ ID NO: 19390 - protein, 15 aa, synthetic construct
WGSEESVAESLEVRG

SEQ ID NO: 19391 - protein, 15 aa, synthetic construct
WGSGREEEQPEPPPP

SEQ ID NO: 19392 - protein, 15 aa, synthetic construct
WGSPGRLGARTGRPR

SEQ ID NO: 19393 - protein, 15 aa, synthetic construct
WGSSLEKYLGTKEGQ

SEQ ID NO: 19394 - protein, 15 aa, synthetic construct
WGSVRRAPRTPPFSA

SEQ ID NO: 19395 - protein, 15 aa, synthetic construct
WGTAGEGHSGTSPAL

SEQ ID NO: 19396 - protein, 15 aa, synthetic construct
WGTCRASCASPSRCA

SEQ ID NO: 19397 - protein, 15 aa, synthetic construct
WGTERNVSLPPNPPC

SEQ ID NO: 19398 - protein, 15 aa, synthetic construct
WGTRRPPRKAARWRA

SEQ ID NO: 19399 - protein, 15 aa, synthetic construct
WGTSEGPQASTLPGG

SEQ ID NO: 19400 - protein, 15 aa, synthetic construct
WGWGCCSRCCCSGLG

SEQ ID NO: 19401 - protein, 15 aa, synthetic construct
WGWGGKEELGRLSPI

SEQ ID NO: 19402 - protein, 15 aa, synthetic construct
WHGGDSCHNPSASVE

SEQ ID NO: 19403 - protein, 15 aa, synthetic construct
WHGGSRRSWPPSSSS

SEQ ID NO: 19404 - protein, 13 aa, synthetic construct
WHGHDLDPPGGNT

SEQ ID NO: 19405 - protein, 15 aa, synthetic construct
WHKAYDCTLQPEEAI

SEQ ID NO: 19406 - protein, 15 aa, synthetic construct
WHQPRDKHGPQGDER

SEQ ID NO: 19407 - protein, 15 aa, synthetic construct
WIARGQAPRAPAGPC

SEQ ID NO: 19408 - protein, 15 aa, synthetic construct
WIITGEESWDPGDYY

SEQ ID NO: 19409 - protein, 15 aa, synthetic construct
WILGLCGMPTPPLGA

SEQ ID NO: 19410 - protein, 15 aa, synthetic construct
WILNTPNLSHPRHLQ

SEQ ID NO: 19411 - protein, 15 aa, synthetic construct
WIMISRRSWRRSGSG

SEQ ID NO: 19412 - protein, 15 aa, synthetic construct
WINTTIQAWLNLCSL

SEQ ID NO: 19413 - protein, 12 aa, synthetic construct
WIPNRRTCASLG

SEQ ID NO: 19414 - protein, 15 aa, synthetic construct
WIPPPVLPMTPASRF

SEQ ID NO: 19415 - protein, 15 aa, synthetic construct
WISKEEGSPASTDFE

SEQ ID NO: 19416 - protein, 15 aa, synthetic construct
WKCRPCRMWRTCRCC

SEQ ID NO: 19417 - protein, 15 aa, synthetic construct
WKEAGEAATKPQGDW

SEQ ID NO: 19418 - protein, 15 aa, synthetic construct
WKEAGEAATKPQGYW

SEQ ID NO: 19419 - protein, 15 aa, synthetic construct
WKEAGSMGKDSSLAS

SEQ ID NO: 19420 - protein, 15 aa, synthetic construct
WKEAGSTGKDFPSTS

SEQ ID NO: 19421 - protein, 15 aa, synthetic construct
WKEPGEGEAAAAAAA

SEQ ID NO: 19422 - protein, 15 aa, synthetic construct
WKESTTPAVSPSLSS

SEQ ID NO: 19423 - protein, 15 aa, synthetic construct
WKGLQQDPLSRRRPG

SEQ ID NO: 19424 - protein, 15 aa, synthetic construct
WKGSNPWKRMWEMQP

SEQ ID NO: 19425 - protein, 15 aa, synthetic construct
WKGVRTERAKPGAPS

SEQ ID NO: 19426 - protein, 15 aa, synthetic construct
WKIPRRHRRPPTTPR

SEQ ID NO: 19427 - protein, 15 aa, synthetic construct
WKIRRGLASPGPGRE

SEQ ID NO: 19428 - protein, 12 aa, synthetic construct
WKKIEVEPMEIE

SEQ ID NO: 19429 - protein, 15 aa, synthetic construct
WKKMKARNVSRAFLT

SEQ ID NO: 19430 - protein, 15 aa, synthetic construct
WKKRSVQKRVAAVRK

SEQ ID NO: 19431 - protein, 15 aa, synthetic construct
WKKTRPWNQKPGAPL

SEQ ID NO: 19432 - protein, 15 aa, synthetic construct
WKLPRPGSCSSYFSS

SEQ ID NO: 19433 - protein, 15 aa, synthetic construct
WKLQMPPGATGRAQK

SEQ ID NO: 19434 - protein, 15 aa, synthetic construct
WKLTGPRTASSTPRS

SEQ ID NO: 19435 - protein, 15 aa, synthetic construct
WKPEINFQLLLLEPP

SEQ ID NO: 19436 - protein, 15 aa, synthetic construct
WKPMVICRGSHAFKD

SEQ ID NO: 19437 - protein, 15 aa, synthetic construct
WKQEIKHMPKNFSSW

SEQ ID NO: 19438 - protein, 15 aa, synthetic construct
WKQGTSRGYQTLSSW

SEQ ID NO: 19439 - protein, 15 aa, synthetic construct
WKRALSRPPWLWGCP

SEQ ID NO: 19440 - protein, 15 aa, synthetic construct
WKRDPAKNLAAEKSP

SEQ ID NO: 19441 - protein, 15 aa, synthetic construct
WKRFWGRGPDFGRGV

SEQ ID NO: 19442 - protein, 14 aa, synthetic construct
WKSLGPQVGSAKTK

SEQ ID NO: 19443 - protein, 15 aa, synthetic construct
WLAGPEASEATPARI

SEQ ID NO: 19444 - protein, 15 aa, synthetic construct
WLCGGWGPRCCCCRC

SEQ ID NO: 19445 - protein, 15 aa, synthetic construct
WLCRDPREDFWAPST

SEQ ID NO: 19446 - protein, 14 aa, synthetic construct
WLDWEAPAGCREGW

SEQ ID NO: 19447 - protein, 15 aa, synthetic construct
WLFPIGRTPLSCLTS

SEQ ID NO: 19448 - protein, 15 aa, synthetic construct
WLGAAGGGHPSAVAS

SEQ ID NO: 19449 - protein, 15 aa, synthetic construct
WLGKRGANPAPEGPP

SEQ ID NO: 19450 - protein, 15 aa, synthetic construct
WLHPASRAVTAPKSL

SEQ ID NO: 19451 - protein, 12 aa, synthetic construct
WLKDRDPLEAEK

SEQ ID NO: 19452 - protein, 15 aa, synthetic construct
WLKSRRIMIPAQMKM

SEQ ID NO: 19453 - protein, 15 aa, synthetic construct
WLKVKEESTLWKAWH

SEQ ID NO: 19454 - protein, 15 aa, synthetic construct
WLLMGWTNARLCCQH

SEQ ID NO: 19455 - protein, 15 aa, synthetic construct
WLLRSRSQAAAAAAA

SEQ ID NO: 19456 - protein, 15 aa, synthetic construct
WLNTRAPRARPAAPC

SEQ ID NO: 19457 - protein, 15 aa, synthetic construct
WLPARAGEAELSVPL

SEQ ID NO: 19458 - protein, 12 aa, synthetic construct
WLPCAPAPGSLC

SEQ ID NO: 19459 - protein, 15 aa, synthetic construct
WLPNASRPASLLGLS

SEQ ID NO: 19460 - protein, 15 aa, synthetic construct
WLPPENSALAVSLRC

SEQ ID NO: 19461 - protein, 15 aa, synthetic construct
WLPQPPGRSDAEPGQ

SEQ ID NO: 19462 - protein, 14 aa, synthetic construct
WLPRVCCGKDEPGR

SEQ ID NO: 19463 - protein, 15 aa, synthetic construct
WLQAGLAAQRGETGE

SEQ ID NO: 19464 - protein, 15 aa, synthetic construct
WLQDPSPRPSSRRRP

SEQ ID NO: 19465 - protein, 15 aa, synthetic construct
WLQIGHSHGVREDPA

SEQ ID NO: 19466 - protein, 15 aa, synthetic construct
WLQVAEVSARLWPPL

SEQ ID NO: 19467 - protein, 15 aa, synthetic construct
WLRPAAAAAGRRRRA

SEQ ID NO: 19468 - protein, 15 aa, synthetic construct
WLRPADRAPGALTTT

SEQ ID NO: 19469 - protein, 15 aa, synthetic construct
WLRPPGSAARPRAPS

SEQ ID NO: 19470 - protein, 15 aa, synthetic construct
WLRPQPAPGSRTSIS

SEQ ID NO: 19471 - protein, 15 aa, synthetic construct
WLRPRRRPPLVPKVA

SEQ ID NO: 19472 - protein, 15 aa, synthetic construct
WLSAGGRGDREATGS

SEQ ID NO: 19473 - protein, 15 aa, synthetic construct
WLSESCASQDKGKSC

SEQ ID NO: 19474 - protein, 15 aa, synthetic construct
WLSHQSNMNFHISKE

SEQ ID NO: 19475 - protein, 15 aa, synthetic construct
WLSLQDLDGRQPLQL

SEQ ID NO: 19476 - protein, 14 aa, synthetic construct
WLSPRRRRRRRRRS

SEQ ID NO: 19477 - protein, 15 aa, synthetic construct
WLSRLAPEPWQRMDL

SEQ ID NO: 19478 - protein, 15 aa, synthetic construct
WLVLDAQGRGPGSGG

SEQ ID NO: 19479 - protein, 15 aa, synthetic construct
WLWLPVPTLTPTCHP

SEQ ID NO: 19480 - protein, 15 aa, synthetic construct
WLWPHSRWWRPVGVE

SEQ ID NO: 19481 - protein, 15 aa, synthetic construct
WLWRWPRGGDSGKRP

SEQ ID NO: 19482 - protein, 15 aa, synthetic construct
WMARRGAMDSAKSGG

SEQ ID NO: 19483 - protein, 15 aa, synthetic construct
WMEPMAAPKPISSYW

SEQ ID NO: 19484 - protein, 15 aa, synthetic construct
WMNMTRTSSWTKKMG

SEQ ID NO: 19485 - protein, 14 aa, synthetic construct
WMNRQEGSGWTRIV

SEQ ID NO: 19486 - protein, 15 aa, synthetic construct
WMQSTLGMSSPGQKE

SEQ ID NO: 19487 - protein, 15 aa, synthetic construct
WMQWSQGDVAGPACW

SEQ ID NO: 19488 - protein, 15 aa, synthetic construct
WMRSAPSTSSGPAKQ

SEQ ID NO: 19489 - protein, 15 aa, synthetic construct
WNLCSWPIPPAQNCI

SEQ ID NO: 19490 - protein, 15 aa, synthetic construct
WNNLGRIPPQTTSWT

SEQ ID NO: 19491 - protein, 15 aa, synthetic construct
WNPRPSPRKGACLCH

SEQ ID NO: 19492 - protein, 15 aa, synthetic construct
WNQETKPVHLNSSSW

SEQ ID NO: 19493 - protein, 15 aa, synthetic construct
WNQKEAKGWEMPAFP

SEQ ID NO: 19494 - protein, 15 aa, synthetic construct
WNQKSKPKSQNSSSR

SEQ ID NO: 19495 - protein, 15 aa, synthetic construct
WNSARKDIAFSGSSL

SEQ ID NO: 19496 - protein, 15 aa, synthetic construct
WNSASSSSLHSSQDS

SEQ ID NO: 19497 - protein, 15 aa, synthetic construct
WNSGTGSVPSDTCRL

SEQ ID NO: 19498 - protein, 15 aa, synthetic construct
WNSPLDPSKLTTSVA

SEQ ID NO: 19499 - protein, 15 aa, synthetic construct
WPAAREARRGIRAAA

SEQ ID NO: 19500 - protein, 15 aa, synthetic construct
WPAASLRRKLTGASW

SEQ ID NO: 19501 - protein, 15 aa, synthetic construct
WPAATGPPPGPHCPR

SEQ ID NO: 19502 - protein, 15 aa, synthetic construct
WPACRTWNCGGSCRP

SEQ ID NO: 19503 - protein, 15 aa, synthetic construct
WPAHPPPSGATAAAA

SEQ ID NO: 19504 - protein, 15 aa, synthetic construct
WPAPLSSSATSRTSR

SEQ ID NO: 19505 - protein, 15 aa, synthetic construct
WPAPWCSSPAVPRAS

SEQ ID NO: 19506 - protein, 15 aa, synthetic construct
WPARASGGWRPEVPG

SEQ ID NO: 19507 - protein, 15 aa, synthetic construct
WPARDGVGAGPSGEG

SEQ ID NO: 19508 - protein, 15 aa, synthetic construct
WPARSSSGRGGGTTE

SEQ ID NO: 19509 - protein, 15 aa, synthetic construct
WPASETRCRPATGEE

SEQ ID NO: 19510 - protein, 15 aa, synthetic construct
WPASFAHFREFLQGF

SEQ ID NO: 19511 - protein, 15 aa, synthetic construct
WPASSAPGRPPAKTS

SEQ ID NO: 19512 - protein, 12 aa, synthetic construct
WPASTRASTSIP

SEQ ID NO: 19513 - protein, 15 aa, synthetic construct
WPATGPGSNSGSAAT

SEQ ID NO: 19514 - protein, 15 aa, synthetic construct
WPAVPPVGPVAPAAA

SEQ ID NO: 19515 - protein, 15 aa, synthetic construct
WPAWGFGATLLDLSC

SEQ ID NO: 19516 - protein, 15 aa, synthetic construct
WPDCSGLQPGSCSPG

SEQ ID NO: 19517 - protein, 15 aa, synthetic construct
WPDTGPQTTSAPFQA

SEQ ID NO: 19518 - protein, 15 aa, synthetic construct
WPEALREAVGTRVGA

SEQ ID NO: 19519 - protein, 15 aa, synthetic construct
WPEDSRFPCRGWPQD

SEQ ID NO: 19520 - protein, 15 aa, synthetic construct
WPELTRSPRAEVAAG

SEQ ID NO: 19521 - protein, 15 aa, synthetic construct
WPEPARRRRRRRRRG

SEQ ID NO: 19522 - protein, 15 aa, synthetic construct
WPEPRAPLGGSRSWS

SEQ ID NO: 19523 - protein, 15 aa, synthetic construct
WPEPSRLLVNPPVGK

SEQ ID NO: 19524 - protein, 15 aa, synthetic construct
WPERRRRWPREQQLE

SEQ ID NO: 19525 - protein, 15 aa, synthetic construct
WPESGEAGDRGEERE

SEQ ID NO: 19526 - protein, 15 aa, synthetic construct
WPGAARRRQTTGEAS

SEQ ID NO: 19527 - protein, 15 aa, synthetic construct
WPGGRWPPADCGCCC

SEQ ID NO: 19528 - protein, 15 aa, synthetic construct
WPGLRGTAGPWGCCC

SEQ ID NO: 19529 - protein, 15 aa, synthetic construct
WPGSPLRRRVPRAAT

SEQ ID NO: 19530 - protein, 15 aa, synthetic construct
WPGTDAVAARAGADI

SEQ ID NO: 19531 - protein, 15 aa, synthetic construct
WPGTPTSAGGCRSPA

SEQ ID NO: 19532 - protein, 15 aa, synthetic construct
WPGTRLPGDLFGRAG

SEQ ID NO: 19533 - protein, 15 aa, synthetic construct
WPGTTTTSSSCSSSA

SEQ ID NO: 19534 - protein, 15 aa, synthetic construct
WPHHQGVPDERPKNQ

SEQ ID NO: 19535 - protein, 14 aa, synthetic construct
WPKGEKEARTRSSF

SEQ ID NO: 19536 - protein, 15 aa, synthetic construct
WPLARPGEAAAGGSR

SEQ ID NO: 19537 - protein, 15 aa, synthetic construct
WPLGRAEAGVAPHRR

SEQ ID NO: 19538 - protein, 15 aa, synthetic construct
WPLPAQRGGRSSRSW

SEQ ID NO: 19539 - protein, 12 aa, synthetic construct
WPLPPSPAGPRE

SEQ ID NO: 19540 - protein, 15 aa, synthetic construct
WPMTAAGPAGRARAS

SEQ ID NO: 19541 - protein, 15 aa, synthetic construct
WPNLMNLTGRRKFPP

SEQ ID NO: 19542 - protein, 15 aa, synthetic construct
WPPAAARRKRGNGGG

SEQ ID NO: 19543 - protein, 14 aa, synthetic construct
WPPAGRPCGPIAPT

SEQ ID NO: 19544 - protein, 14 aa, synthetic construct
WPPAPSGAATSAAC

SEQ ID NO: 19545 - protein, 15 aa, synthetic construct
WPPGGQGSAPPCAPA

SEQ ID NO: 19546 - protein, 15 aa, synthetic construct
WPPGPSCCCCCSSGA

SEQ ID NO: 19547 - protein, 15 aa, synthetic construct
WPPGVEKSGEGLGGL

SEQ ID NO: 19548 - protein, 15 aa, synthetic construct
WPPGVEKSGEGLRGL

SEQ ID NO: 19549 - protein, 15 aa, synthetic construct
WPPLRAPGPRWNSEG

SEQ ID NO: 19550 - protein, 15 aa, synthetic construct
WPPLRPPPPPSRPPR

SEQ ID NO: 19551 - protein, 15 aa, synthetic construct
WPPLSRYVACTERDP

SEQ ID NO: 19552 - protein, 14 aa, synthetic construct
WPPNAPSATRPCTS

SEQ ID NO: 19553 - protein, 15 aa, synthetic construct
WPPPCSRPRSNLPSG

SEQ ID NO: 19554 - protein, 15 aa, synthetic construct
WPPPGAACPLRSGSS

SEQ ID NO: 19555 - protein, 15 aa, synthetic construct
WPPPGSCACSTCRRG

SEQ ID NO: 19556 - protein, 15 aa, synthetic construct
WPPPPCPSAPAPALT

SEQ ID NO: 19557 - protein, 15 aa, synthetic construct
WPPPPCPSAPAPAPT

SEQ ID NO: 19558 - protein, 15 aa, synthetic construct
WPPPPPPLPRAPRTP

SEQ ID NO: 19559 - protein, 15 aa, synthetic construct
WPPPPPPRRAEEEEE

SEQ ID NO: 19560 - protein, 15 aa, synthetic construct
WPPPPPPRSISRSCT

SEQ ID NO: 19561 - protein, 15 aa, synthetic construct
WPPPSSCCTPAMEAP

SEQ ID NO: 19562 - protein, 15 aa, synthetic construct
WPPRCSPGPRALPAE

SEQ ID NO: 19563 - protein, 15 aa, synthetic construct
WPPRESPATWRRSRT

SEQ ID NO: 19564 - protein, 15 aa, synthetic construct
WPPRPAPLPSPLGLS

SEQ ID NO: 19565 - protein, 15 aa, synthetic construct
WPPRPREAARLSQPA

SEQ ID NO: 19566 - protein, 15 aa, synthetic construct
WPPSHQQPAPPSSPQ

SEQ ID NO: 19567 - protein, 15 aa, synthetic construct
WPPTLTAPALGPALG

SEQ ID NO: 19568 - protein, 15 aa, synthetic construct
WPPTPPATSTLPGRS

SEQ ID NO: 19569 - protein, 15 aa, synthetic construct
WPPVGARGGGGAGGS

SEQ ID NO: 19570 - protein, 15 aa, synthetic construct
WPPWAPGHRPRAGHE

SEQ ID NO: 19571 - protein, 15 aa, synthetic construct
WPQAAVRPSPASSSA

SEQ ID NO: 19572 - protein, 15 aa, synthetic construct
WPQPEGPSSLRPGWG

SEQ ID NO: 19573 - protein, 15 aa, synthetic construct
WPQPEPASQPVSAGQ

SEQ ID NO: 19574 - protein, 15 aa, synthetic construct
WPQPSPVRSSLPRAP

SEQ ID NO: 19575 - protein, 15 aa, synthetic construct
WPQPWRSWRGSCRGR

SEQ ID NO: 19576 - protein, 15 aa, synthetic construct
WPRAGGAGTAPTKTI

SEQ ID NO: 19577 - protein, 15 aa, synthetic construct
WPRALSSRRSRRAQR

SEQ ID NO: 19578 - protein, 15 aa, synthetic construct
WPRARPAGRIRRRPT

SEQ ID NO: 19579 - protein, 15 aa, synthetic construct
WPRGAEVSVPASGAG

SEQ ID NO: 19580 - protein, 15 aa, synthetic construct
WPRGGPDRGAAPGQP

SEQ ID NO: 19581 - protein, 13 aa, synthetic construct
WPRPEPAPSAFRE

SEQ ID NO: 19582 - protein, 13 aa, synthetic construct
WPRPPTASPVSSE

SEQ ID NO: 19583 - protein, 15 aa, synthetic construct
WPRPRSRRGLPRVPR

SEQ ID NO: 19584 - protein, 15 aa, synthetic construct
WPRPTRPPPATPRPT

SEQ ID NO: 19585 - protein, 15 aa, synthetic construct
WPRPVMDSSLVNEAV

SEQ ID NO: 19586 - protein, 15 aa, synthetic construct
WPRQKTPGTGEPTSK

SEQ ID NO: 19587 - protein, 15 aa, synthetic construct
WPRRGSWGLGSWGLW

SEQ ID NO: 19588 - protein, 15 aa, synthetic construct
WPRRREGQRSPLAPA

SEQ ID NO: 19589 - protein, 15 aa, synthetic construct
WPRRRRPRRGRRRRP

SEQ ID NO: 19590 - protein, 15 aa, synthetic construct
WPRRRTGAAASCRGA

SEQ ID NO: 19591 - protein, 15 aa, synthetic construct
WPRRSGEPSASASSG

SEQ ID NO: 19592 - protein, 12 aa, synthetic construct
WPRSEGARRAAC

SEQ ID NO: 19593 - protein, 15 aa, synthetic construct
WPRSRMERRPRPART

SEQ ID NO: 19594 - protein, 13 aa, synthetic construct
WPRSWGAAEGLEG

SEQ ID NO: 19595 - protein, 15 aa, synthetic construct
WPRVVKAAVLRAPRI

SEQ ID NO: 19596 - protein, 15 aa, synthetic construct
WPSAPGAPGAAACWR

SEQ ID NO: 19597 - protein, 15 aa, synthetic construct
WPSCCGACRIPSSSP

SEQ ID NO: 19598 - protein, 15 aa, synthetic construct
WPSCSASWWWSRCPR

SEQ ID NO: 19599 - protein, 15 aa, synthetic construct
WPSMENMKPVLTMGR

SEQ ID NO: 19600 - protein, 15 aa, synthetic construct
WPSPSRSKRCSSRPS

SEQ ID NO: 19601 - protein, 15 aa, synthetic construct
WPSQGPAAKRPPAVL

SEQ ID NO: 19602 - protein, 15 aa, synthetic construct
WPSRHPRTAPSPRKP

SEQ ID NO: 19603 - protein, 15 aa, synthetic construct
WPSRSGSGQSSKGAR

SEQ ID NO: 19604 - protein, 15 aa, synthetic construct
WPSSGASKGSQAAIR

SEQ ID NO: 19605 - protein, 15 aa, synthetic construct
WPSSSRPVSSGGLSF

SEQ ID NO: 19606 - protein, 15 aa, synthetic construct
WPSTAATTSECIRSP

SEQ ID NO: 19607 - protein, 15 aa, synthetic construct
WPTAPPLWPSASVME

SEQ ID NO: 19608 - protein, 15 aa, synthetic construct
WPTGKAAALLGGGGS

SEQ ID NO: 19609 - protein, 15 aa, synthetic construct
WPTSRCSESSGSSRR

SEQ ID NO: 19610 - protein, 15 aa, synthetic construct
WPTTRATAPRPATWP

SEQ ID NO: 19611 - protein, 15 aa, synthetic construct
WPTWKTERKPAPWPL

SEQ ID NO: 19612 - protein, 15 aa, synthetic construct
WPVRCAARPRAWPPA

SEQ ID NO: 19613 - protein, 15 aa, synthetic construct
WPWGITAPSPSSSSL

SEQ ID NO: 19614 - protein, 15 aa, synthetic construct
WPWRATGASWRCWGR

SEQ ID NO: 19615 - protein, 15 aa, synthetic construct
WQADASSCGWPGSGR

SEQ ID NO: 19616 - protein, 15 aa, synthetic construct
WQAEDTGASWAPSTC

SEQ ID NO: 19617 - protein, 15 aa, synthetic construct
WQAVSCSTTAPRCPS

SEQ ID NO: 19618 - protein, 15 aa, synthetic construct
WQAYQDPLCPAASAP

SEQ ID NO: 19619 - protein, 15 aa, synthetic construct
WQCPATLHESGTSPS

SEQ ID NO: 19620 - protein, 15 aa, synthetic construct
WQEAQPRPGVTLWPC

SEQ ID NO: 19621 - protein, 15 aa, synthetic construct
WQFSQAPVSPDVCSP

SEQ ID NO: 19622 - protein, 13 aa, synthetic construct
WQGNKIGIPRNWA

SEQ ID NO: 19623 - protein, 15 aa, synthetic construct
WQKWRKKGDLPKING

SEQ ID NO: 19624 - protein, 12 aa, synthetic construct
WQLQPNASSAED

SEQ ID NO: 19625 - protein, 15 aa, synthetic construct
WQNMSVSLKLTKNSR

SEQ ID NO: 19626 - protein, 15 aa, synthetic construct
WQPGEAKLGPPARGV

SEQ ID NO: 19627 - protein, 15 aa, synthetic construct
WQPGQEFPDREFAAG

SEQ ID NO: 19628 - protein, 15 aa, synthetic construct
WQPPAPQLSTATSGP

SEQ ID NO: 19629 - protein, 15 aa, synthetic construct
WQPPPMWTTSPPSAS

SEQ ID NO: 19630 - protein, 15 aa, synthetic construct
WQPPYGSSELPPVSG

SEQ ID NO: 19631 - protein, 15 aa, synthetic construct
WQPRWQPGRRETSEK

SEQ ID NO: 19632 - protein, 15 aa, synthetic construct
WQPSKWTAEGRWQQS

SEQ ID NO: 19633 - protein, 15 aa, synthetic construct
WQPVWIFTGLPQGQP

SEQ ID NO: 19634 - protein, 15 aa, synthetic construct
WQRGRRSSTPRSPTS

SEQ ID NO: 19635 - protein, 15 aa, synthetic construct
WQRPATPACPARRCP

SEQ ID NO: 19636 - protein, 15 aa, synthetic construct
WQRQWQLQPGGCGGP

SEQ ID NO: 19637 - protein, 15 aa, synthetic construct
WQRRARAPRAPAGRV

SEQ ID NO: 19638 - protein, 13 aa, synthetic construct
WQRRNCTRKGCKP

SEQ ID NO: 19639 - protein, 15 aa, synthetic construct
WQRRPAGQGWVLWPI

SEQ ID NO: 19640 - protein, 15 aa, synthetic construct
WQRRRTSRKMPRRKG

SEQ ID NO: 19641 - protein, 13 aa, synthetic construct
WQRWLRTSTQELK

SEQ ID NO: 19642 - protein, 15 aa, synthetic construct
WQSPPRQPAGRSASS

SEQ ID NO: 19643 - protein, 15 aa, synthetic construct
WQSYSSSCSYVELPR

SEQ ID NO: 19644 - protein, 15 aa, synthetic construct
WQTISETSGGRTSRL

SEQ ID NO: 19645 - protein, 15 aa, synthetic construct
WQTPSWICSMTQIYL

SEQ ID NO: 19646 - protein, 15 aa, synthetic construct
WQWGSPESFCSASLG

SEQ ID NO: 19647 - protein, 15 aa, synthetic construct
WQWPLRRQYWPLWAG

SEQ ID NO: 19648 - protein, 15 aa, synthetic construct
WRAARGCAERPCATC

SEQ ID NO: 19649 - protein, 15 aa, synthetic construct
WRAATKRPSRGTAST

SEQ ID NO: 19650 - protein, 15 aa, synthetic construct
WRAEAHWLPRACCCC

SEQ ID NO: 19651 - protein, 15 aa, synthetic construct
WRAGPTARPRRAAPS

SEQ ID NO: 19652 - protein, 15 aa, synthetic construct
WRAHQSSGPAQEQRV

SEQ ID NO: 19653 - protein, 15 aa, synthetic construct
WRAPIEPPFRSLSSP

SEQ ID NO: 19654 - protein, 15 aa, synthetic construct
WRAQLHLQPQSPPWL

SEQ ID NO: 19655 - protein, 15 aa, synthetic construct
WRARAPPEARGQGGP

SEQ ID NO: 19656 - protein, 15 aa, synthetic construct
WRARPRPRPTSSRAR

SEQ ID NO: 19657 - protein, 15 aa, synthetic construct
WRASCGRCCCGAAAC

SEQ ID NO: 19658 - protein, 12 aa, synthetic construct
WRASPRSPSACS

SEQ ID NO: 19659 - protein, 15 aa, synthetic construct
WRATGGGQRRCGKDG

SEQ ID NO: 19660 - protein, 15 aa, synthetic construct
WRCARPRAAGVPCSG

SEQ ID NO: 19661 - protein, 15 aa, synthetic construct
WRCEWCGACGPCSAP

SEQ ID NO: 19662 - protein, 15 aa, synthetic construct
WRCPGRNISDWLCKR

SEQ ID NO: 19663 - protein, 15 aa, synthetic construct
WRCTTRRRRRRSRTP

SEQ ID NO: 19664 - protein, 15 aa, synthetic construct
WRELRTSAGGAPRQG

SEQ ID NO: 19665 - protein, 15 aa, synthetic construct
WRFSSLFASAVTAPM

SEQ ID NO: 19666 - protein, 15 aa, synthetic construct
WRGATWTARAPHGGA

SEQ ID NO: 19667 - protein, 15 aa, synthetic construct
WRGDPGRRPPPGRSS

SEQ ID NO: 19668 - protein, 15 aa, synthetic construct
WRGEAGRREAGAAAR

SEQ ID NO: 19669 - protein, 15 aa, synthetic construct
WRGGAPGWAGSRWPG

SEQ ID NO: 19670 - protein, 15 aa, synthetic construct
WRGGGAKPASGLAAC

SEQ ID NO: 19671 - protein, 15 aa, synthetic construct
WRGPGEPGSRCSWRC

SEQ ID NO: 19672 - protein, 15 aa, synthetic construct
WRGPQRAAEAEVPGG

SEQ ID NO: 19673 - protein, 15 aa, synthetic construct
WRGPRKSRSQIEEYR

SEQ ID NO: 19674 - protein, 15 aa, synthetic construct
WRGRASPVPPQRAGN

SEQ ID NO: 19675 - protein, 15 aa, synthetic construct
WRGRASRGPAASPAS

SEQ ID NO: 19676 - protein, 15 aa, synthetic construct
WRGRRAAEAAAEAAR

SEQ ID NO: 19677 - protein, 15 aa, synthetic construct
WRGRRARGALPGGAG

SEQ ID NO: 19678 - protein, 15 aa, synthetic construct
WRGRSGGGGPWAPAL

SEQ ID NO: 19679 - protein, 15 aa, synthetic construct
WRGSWKASAELALGR

SEQ ID NO: 19680 - protein, 15 aa, synthetic construct
WRGVARWRRCAGRSG

SEQ ID NO: 19681 - protein, 15 aa, synthetic construct
WRHRRDPPRGTDPST

SEQ ID NO: 19682 - protein, 15 aa, synthetic construct
WRIPAKAPARGPGRW

SEQ ID NO: 19683 - protein, 15 aa, synthetic construct
WRIPQPPRPQLPLQP

SEQ ID NO: 19684 - protein, 15 aa, synthetic construct
WRIPRPHCPCGKAAP

SEQ ID NO: 19685 - protein, 15 aa, synthetic construct
WRKAESPNDRSWALT

SEQ ID NO: 19686 - protein, 15 aa, synthetic construct
WRKAGSATKAPTPPA

SEQ ID NO: 19687 - protein, 15 aa, synthetic construct
WRKKAAAAAVGPLGS

SEQ ID NO: 19688 - protein, 15 aa, synthetic construct
WRKVEAAVSDRMRRL

SEQ ID NO: 19689 - protein, 15 aa, synthetic construct
WRLDGCTIGDKGKSL

SEQ ID NO: 19690 - protein, 15 aa, synthetic construct
WRLEQARERPAPTAA

SEQ ID NO: 19691 - protein, 15 aa, synthetic construct
WRLGPEQEPARNPRA

SEQ ID NO: 19692 - protein, 14 aa, synthetic construct
WRLKRRMWISKGTW

SEQ ID NO: 19693 - protein, 15 aa, synthetic construct
WRLLSEGAEGPGHGC

SEQ ID NO: 19694 - protein, 15 aa, synthetic construct
WRLPASSTGGEFLPS

SEQ ID NO: 19695 - protein, 15 aa, synthetic construct
WRLPKPRPWTEFSVQ

SEQ ID NO: 19696 - protein, 15 aa, synthetic construct
WRLPMSLQRESHSFY

SEQ ID NO: 19697 - protein, 13 aa, synthetic construct
WRLPRVAATEKLA

SEQ ID NO: 19698 - protein, 12 aa, synthetic construct
WRLPWATWPTAQ

SEQ ID NO: 19699 - protein, 15 aa, synthetic construct
WRLQERAGLQAAEAA

SEQ ID NO: 19700 - protein, 15 aa, synthetic construct
WRLQSLGTQAHLLAA

SEQ ID NO: 19701 - protein, 15 aa, synthetic construct
WRLRRRQRPRRRRPR

SEQ ID NO: 19702 - protein, 15 aa, synthetic construct
WRLRRTPSATQGATS

SEQ ID NO: 19703 - protein, 15 aa, synthetic construct
WRLSRGAGTTEDSSC

SEQ ID NO: 19704 - protein, 15 aa, synthetic construct
WRLSSRTDSAPHWPW

SEQ ID NO: 19705 - protein, 15 aa, synthetic construct
WRLWCWRRRGCCGAR

SEQ ID NO: 19706 - protein, 15 aa, synthetic construct
WRLWDRGPAPEPAPR

SEQ ID NO: 19707 - protein, 15 aa, synthetic construct
WRMRSRRLGAAARMA

SEQ ID NO: 19708 - protein, 15 aa, synthetic construct
WRPAAGVRSMADPQS

SEQ ID NO: 19709 - protein, 15 aa, synthetic construct
WRPAGSSFADKGKSF

SEQ ID NO: 19710 - protein, 15 aa, synthetic construct
WRPAKEPQPREMRSQ

SEQ ID NO: 19711 - protein, 13 aa, synthetic construct
WRPAKGAGACASC

SEQ ID NO: 19712 - protein, 15 aa, synthetic construct
WRPARNRSGTAGLGA

SEQ ID NO: 19713 - protein, 13 aa, synthetic construct
WRPARSGSRRRST

SEQ ID NO: 19714 - protein, 15 aa, synthetic construct
WRPEASSCCSQGPWP

SEQ ID NO: 19715 - protein, 15 aa, synthetic construct
WRPERGRSAFRNKGK

SEQ ID NO: 19716 - protein, 15 aa, synthetic construct
WRPGGKAPSATPPSS

SEQ ID NO: 19717 - protein, 15 aa, synthetic construct
WRPLDGILDARLGPR

SEQ ID NO: 19718 - protein, 15 aa, synthetic construct
WRPLSPSAKSPSAKP

SEQ ID NO: 19719 - protein, 14 aa, synthetic construct
WRPPGRLVRLLRRP

SEQ ID NO: 19720 - protein, 14 aa, synthetic construct
WRPPGSSSLGETGR

SEQ ID NO: 19721 - protein, 12 aa, synthetic construct
WRPPGTMQEPSS

SEQ ID NO: 19722 - protein, 14 aa, synthetic construct
WRPPPPPGLRQGSE

SEQ ID NO: 19723 - protein, 15 aa, synthetic construct
WRPPPRPGSSGFPKW

SEQ ID NO: 19724 - protein, 15 aa, synthetic construct
WRPPPVSSSGCGTGR

SEQ ID NO: 19725 - protein, 15 aa, synthetic construct
WRPPQVDRSCCSSPL

SEQ ID NO: 19726 - protein, 15 aa, synthetic construct
WRPPRRQPRQQRPRP

SEQ ID NO: 19727 - protein, 15 aa, synthetic construct
WRPPRRRRTRLVFQL

SEQ ID NO: 19728 - protein, 14 aa, synthetic construct
WRPPWERAEEQAPE

SEQ ID NO: 19729 - protein, 15 aa, synthetic construct
WRPPWNSVAGEAAGD

SEQ ID NO: 19730 - protein, 15 aa, synthetic construct
WRPQGPSPGSGGPSP

SEQ ID NO: 19731 - protein, 14 aa, synthetic construct
WRPQMGKGVKGTSH

SEQ ID NO: 19732 - protein, 15 aa, synthetic construct
WRPRAPSGPSGKPSR

SEQ ID NO: 19733 - protein, 15 aa, synthetic construct
WRPRARAAAPGGGAG

SEQ ID NO: 19734 - protein, 12 aa, synthetic construct
WRPRLWWFPQSG

SEQ ID NO: 19735 - protein, 14 aa, synthetic construct
WRPRRPRTGPSRGS

SEQ ID NO: 19736 - protein, 15 aa, synthetic construct
WRPRRRRKGWSHGRC

SEQ ID NO: 19737 - protein, 15 aa, synthetic construct
WRPRRRRRRRGPRLW

SEQ ID NO: 19738 - protein, 15 aa, synthetic construct
WRPRSARAGARARSG

SEQ ID NO: 19739 - protein, 15 aa, synthetic construct
WRPRSPAGARCGCLP

SEQ ID NO: 19740 - protein, 15 aa, synthetic construct
WRPSEFTWAAPQPVW

SEQ ID NO: 19741 - protein, 15 aa, synthetic construct
WRPTCRSGRSPAGLS

SEQ ID NO: 19742 - protein, 15 aa, synthetic construct
WRPWRPGNGPPSEPG

SEQ ID NO: 19743 - protein, 15 aa, synthetic construct
WRPWRRRRRRRNPIR

SEQ ID NO: 19744 - protein, 15 aa, synthetic construct
WRQMGAKAPRAAPTT

SEQ ID NO: 19745 - protein, 15 aa, synthetic construct
WRQPALGQPGCSCSC

SEQ ID NO: 19746 - protein, 15 aa, synthetic construct
WRQPRGNGVEALQFR

SEQ ID NO: 19747 - protein, 15 aa, synthetic construct
WRQSSGRRRGPAKGR

SEQ ID NO: 19748 - protein, 15 aa, synthetic construct
WRQTRQRAPAPQSPS

SEQ ID NO: 19749 - protein, 15 aa, synthetic construct
WRRAARHWRSAASTR

SEQ ID NO: 19750 - protein, 15 aa, synthetic construct
WRRAGDGETESRRPR

SEQ ID NO: 19751 - protein, 15 aa, synthetic construct
WRRAPEPAREPRAGA

SEQ ID NO: 19752 - protein, 15 aa, synthetic construct
WRRARPRPPAPRGSS

SEQ ID NO: 19753 - protein, 15 aa, synthetic construct
WRRASRTRCALTSAT

SEQ ID NO: 19754 - protein, 15 aa, synthetic construct
WRRATERMGRARPRP

SEQ ID NO: 19755 - protein, 15 aa, synthetic construct
WRREESDFLDKGKSC

SEQ ID NO: 19756 - protein, 15 aa, synthetic construct
WRRGGDGAPAAAGRE

SEQ ID NO: 19757 - protein, 15 aa, synthetic construct
WRRGPRTGASPAAPR

SEQ ID NO: 19758 - protein, 15 aa, synthetic construct
WRRGRGPRAARDPRA

SEQ ID NO: 19759 - protein, 15 aa, synthetic construct
WRRHYGWRRSGQGSA

SEQ ID NO: 19760 - protein, 15 aa, synthetic construct
WRRKAGFGVGAGAGG

SEQ ID NO: 19761 - protein, 15 aa, synthetic construct
WRRKATPRNSMMPLK

SEQ ID NO: 19762 - protein, 15 aa, synthetic construct
WRRKEPWPSACECGR

SEQ ID NO: 19763 - protein, 14 aa, synthetic construct
WRRLRRPGRTRAPL

SEQ ID NO: 19764 - protein, 15 aa, synthetic construct
WRRLRTRSQAAPRGC

SEQ ID NO: 19765 - protein, 15 aa, synthetic construct
WRRLSRRRGGGSCCW

SEQ ID NO: 19766 - protein, 15 aa, synthetic construct
WRRPAAASPAATGPG

SEQ ID NO: 19767 - protein, 15 aa, synthetic construct
WRRPELLRRPMARSP

SEQ ID NO: 19768 - protein, 15 aa, synthetic construct
WRRPGCGWEREDSLK

SEQ ID NO: 19769 - protein, 15 aa, synthetic construct
WRRPGGASTLSGAGM

SEQ ID NO: 19770 - protein, 15 aa, synthetic construct
WRRPGGEPRCASVGD

SEQ ID NO: 19771 - protein, 15 aa, synthetic construct
WRRPPLGLCTWGPFS

SEQ ID NO: 19772 - protein, 15 aa, synthetic construct
WRRPPTATLAPAASP

SEQ ID NO: 19773 - protein, 15 aa, synthetic construct
WRRPQQVEESGQSWA

SEQ ID NO: 19774 - protein, 15 aa, synthetic construct
WRRPQRLEEELAGRG

SEQ ID NO: 19775 - protein, 15 aa, synthetic construct
WRRPRPGEAEAEAEA

SEQ ID NO: 19776 - protein, 15 aa, synthetic construct
WRRPRRPRPRARSRR

SEQ ID NO: 19777 - protein, 15 aa, synthetic construct
WRRPRRRSRARARHP

SEQ ID NO: 19778 - protein, 15 aa, synthetic construct
WRRPSSAKSAAAANA

SEQ ID NO: 19779 - protein, 15 aa, synthetic construct
WRRPTTNVASRCSAD

SEQ ID NO: 19780 - protein, 15 aa, synthetic construct
WRRQCRPASCPAKST

SEQ ID NO: 19781 - protein, 15 aa, synthetic construct
WRRQGAPRGQGSGSG

SEQ ID NO: 19782 - protein, 15 aa, synthetic construct
WRRQPRAYWRPGVMS

SEQ ID NO: 19783 - protein, 15 aa, synthetic construct
WRRQRPRPRVRAGQQ

SEQ ID NO: 19784 - protein, 15 aa, synthetic construct
WRRQRRRRRRQRQRQ

SEQ ID NO: 19785 - protein, 15 aa, synthetic construct
WRRRAGSRAPGPSSR

SEQ ID NO: 19786 - protein, 15 aa, synthetic construct
WRRRAPPRALRQTTL

SEQ ID NO: 19787 - protein, 15 aa, synthetic construct
WRRRAPRTASIACPA

SEQ ID NO: 19788 - protein, 14 aa, synthetic construct
WRRRLSLRLLVLTC

SEQ ID NO: 19789 - protein, 15 aa, synthetic construct
WRRRPGRRRRRRRRL

SEQ ID NO: 19790 - protein, 15 aa, synthetic construct
WRRRPRRPSGASSRH

SEQ ID NO: 19791 - protein, 15 aa, synthetic construct
WRRRRAAAPRRRTQG

SEQ ID NO: 19792 - protein, 15 aa, synthetic construct
WRRRRAAAVAPGLAP

SEQ ID NO: 19793 - protein, 15 aa, synthetic construct
WRRRRAAGRRGDGQP

SEQ ID NO: 19794 - protein, 15 aa, synthetic construct
WRRRRAPGGKSVTTT

SEQ ID NO: 19795 - protein, 15 aa, synthetic construct
WRRRRGCGPGSAASP

SEQ ID NO: 19796 - protein, 15 aa, synthetic construct
WRRRRHPSQLQAARA

SEQ ID NO: 19797 - protein, 15 aa, synthetic construct
WRRRRPIWGWGPPSP

SEQ ID NO: 19798 - protein, 15 aa, synthetic construct
WRRRRPRQPWRRPIP

SEQ ID NO: 19799 - protein, 15 aa, synthetic construct
WRRRRPSPRSGAAVP

SEQ ID NO: 19800 - protein, 15 aa, synthetic construct
WRRRRPVATTPAACG

SEQ ID NO: 19801 - protein, 15 aa, synthetic construct
WRRRRQRQQQQQPVF

SEQ ID NO: 19802 - protein, 15 aa, synthetic construct
WRRRRRAELAGLPGP

SEQ ID NO: 19803 - protein, 15 aa, synthetic construct
WRRRRRPPPRPPAAA

SEQ ID NO: 19804 - protein, 15 aa, synthetic construct
WRRRRRPRSSSDSLT

SEQ ID NO: 19805 - protein, 15 aa, synthetic construct
WRRRRRRARARRWSA

SEQ ID NO: 19806 - protein, 15 aa, synthetic construct
WRRRRRRFCPQPQSL

SEQ ID NO: 19807 - protein, 15 aa, synthetic construct
WRRRRRRQQQRGLRA

SEQ ID NO: 19808 - protein, 14 aa, synthetic construct
WRRRRRRRGTRTPG

SEQ ID NO: 19809 - protein, 15 aa, synthetic construct
WRRRRRRRMWRRRRS

SEQ ID NO: 19810 - protein, 15 aa, synthetic construct
WRRRRRRTGPAAPWW

SEQ ID NO: 19811 - protein, 15 aa, synthetic construct
WRRRRRSAAPWAGSS

SEQ ID NO: 19812 - protein, 15 aa, synthetic construct
WRRRRRSGREGRPPG

SEQ ID NO: 19813 - protein, 15 aa, synthetic construct
WRRRRRWWRQRRKWK

SEQ ID NO: 19814 - protein, 15 aa, synthetic construct
WRRRRTSGVQRTEKT

SEQ ID NO: 19815 - protein, 15 aa, synthetic construct
WRRRSRRRSLSCPCA

SEQ ID NO: 19816 - protein, 15 aa, synthetic construct
WRRRTSPSPSPSLRP

SEQ ID NO: 19817 - protein, 15 aa, synthetic construct
WRRSGCGAGRSPPSS

SEQ ID NO: 19818 - protein, 15 aa, synthetic construct
WRRSGEPGDSSAPPP

SEQ ID NO: 19819 - protein, 15 aa, synthetic construct
WRRSRTPRRARRRGR

SEQ ID NO: 19820 - protein, 15 aa, synthetic construct
WRRSRTRPKSRLFLR

SEQ ID NO: 19821 - protein, 15 aa, synthetic construct
WRRTARRRSSTSRRS

SEQ ID NO: 19822 - protein, 15 aa, synthetic construct
WRRTQRAAAPGVAGA

SEQ ID NO: 19823 - protein, 15 aa, synthetic construct
WRRVRLRRRQRRAPG

SEQ ID NO: 19824 - protein, 15 aa, synthetic construct
WRRWAGAGARSADRP

SEQ ID NO: 19825 - protein, 15 aa, synthetic construct
WRRWQQRPRRCGARG

SEQ ID NO: 19826 - protein, 12 aa, synthetic construct
WRSCCASCSCAE

SEQ ID NO: 19827 - protein, 15 aa, synthetic construct
WRSEKAAAWEGGPRP

SEQ ID NO: 19828 - protein, 12 aa, synthetic construct
WRSGVSVTVMPE

SEQ ID NO: 19829 - protein, 15 aa, synthetic construct
WRSLGRLRPEAKPGQ

SEQ ID NO: 19830 - protein, 15 aa, synthetic construct
WRSMSSSLTRSSAVT

SEQ ID NO: 19831 - protein, 12 aa, synthetic construct
WRSPGACARKSN

SEQ ID NO: 19832 - protein, 15 aa, synthetic construct
WRSPGCAGLGRLCGA

SEQ ID NO: 19833 - protein, 15 aa, synthetic construct
WRSRAGPRRGPPFGS

SEQ ID NO: 19834 - protein, 15 aa, synthetic construct
WRSRPEPPPSSPLLS

SEQ ID NO: 19835 - protein, 12 aa, synthetic construct
WRSSQNAEKKKE

SEQ ID NO: 19836 - protein, 15 aa, synthetic construct
WRSSRRRARPRSRST

SEQ ID NO: 19837 - protein, 15 aa, synthetic construct
WRSTISFSLSAPATS

SEQ ID NO: 19838 - protein, 15 aa, synthetic construct
WRTAARSGLTGASSR

SEQ ID NO: 19839 - protein, 15 aa, synthetic construct
WRTAGGGSGRGRWPR

SEQ ID NO: 19840 - protein, 15 aa, synthetic construct
WRTATAAASAAAAVG

SEQ ID NO: 19841 - protein, 15 aa, synthetic construct
WRTEEQRVKMRVQPR

SEQ ID NO: 19842 - protein, 12 aa, synthetic construct
WRTGEWGEAAGK

SEQ ID NO: 19843 - protein, 15 aa, synthetic construct
WRTGLGPSSTSLCSC

SEQ ID NO: 19844 - protein, 15 aa, synthetic construct
WRTQPPRSKKKKTKK

SEQ ID NO: 19845 - protein, 15 aa, synthetic construct
WRTRPRGRAASRRSW

SEQ ID NO: 19846 - protein, 15 aa, synthetic construct
WRTRRDRRSWRPAKP

SEQ ID NO: 19847 - protein, 15 aa, synthetic construct
WRTRRRGRRLGAPGT

SEQ ID NO: 19848 - protein, 15 aa, synthetic construct
WRTRSRFTRCVAQRR

SEQ ID NO: 19849 - protein, 15 aa, synthetic construct
WRTVKEAAKKKSATT

SEQ ID NO: 19850 - protein, 15 aa, synthetic construct
WRTWRRASPTSCSPS

SEQ ID NO: 19851 - protein, 15 aa, synthetic construct
WRVPEGDSNCAMPRP

SEQ ID NO: 19852 - protein, 15 aa, synthetic construct
WRVPRGPAAARAVPR

SEQ ID NO: 19853 - protein, 15 aa, synthetic construct
WRVRVCLPGLIGPPS

SEQ ID NO: 19854 - protein, 15 aa, synthetic construct
WRWLCPRTEPTGGPG

SEQ ID NO: 19855 - protein, 15 aa, synthetic construct
WRWLGLSMCWANSHW

SEQ ID NO: 19856 - protein, 15 aa, synthetic construct
WSAAAAAPGRDPGLR

SEQ ID NO: 19857 - protein, 15 aa, synthetic construct
WSAGPAAPAPSLLPG

SEQ ID NO: 19858 - protein, 14 aa, synthetic construct
WSAGPPRPLRMGTQ

SEQ ID NO: 19859 - protein, 15 aa, synthetic construct
WSAGVPGGGAGVPDR

SEQ ID NO: 19860 - protein, 15 aa, synthetic construct
WSAPCTASPSGAGVP

SEQ ID NO: 19861 - protein, 15 aa, synthetic construct
WSAPRDSSPFLQKMI

SEQ ID NO: 19862 - protein, 15 aa, synthetic construct
WSARGAAAAAGRPGS

SEQ ID NO: 19863 - protein, 15 aa, synthetic construct
WSASGTSWAAAMGAP

SEQ ID NO: 19864 - protein, 15 aa, synthetic construct
WSASPAPRRPPPRRP

SEQ ID NO: 19865 - protein, 15 aa, synthetic construct
WSCGANAPTGSSSAG

SEQ ID NO: 19866 - protein, 15 aa, synthetic construct
WSDLQERAPAPAPWT

SEQ ID NO: 19867 - protein, 15 aa, synthetic construct
WSEEPGSPSSRGVAW

SEQ ID NO: 19868 - protein, 15 aa, synthetic construct
WSEPRAGSAAPGRRA

SEQ ID NO: 19869 - protein, 15 aa, synthetic construct
WSFCGLSPTSQPPAP

SEQ ID NO: 19870 - protein, 15 aa, synthetic construct
WSGATQLQSAERSPA

SEQ ID NO: 19871 - protein, 15 aa, synthetic construct
WSGGIRKGAIGCRWC

SEQ ID NO: 19872 - protein, 15 aa, synthetic construct
WSGHSVAAETEALAA

SEQ ID NO: 19873 - protein, 15 aa, synthetic construct
WSGKWKRRRSRSPPQ

SEQ ID NO: 19874 - protein, 15 aa, synthetic construct
WSGPAPASGSSDSSS

SEQ ID NO: 19875 - protein, 15 aa, synthetic construct
WSGRGGSARRSRRAG

SEQ ID NO: 19876 - protein, 12 aa, synthetic construct
WSGSSSSNSNCE

SEQ ID NO: 19877 - protein, 15 aa, synthetic construct
WSGTNRRLAEGEAAG

SEQ ID NO: 19878 - protein, 15 aa, synthetic construct
WSGVRWRRRRAWRQR

SEQ ID NO: 19879 - protein, 15 aa, synthetic construct
WSLLLKMKGSLGEVS

SEQ ID NO: 19880 - protein, 14 aa, synthetic construct
WSLQGSAFPNKGKS

SEQ ID NO: 19881 - protein, 15 aa, synthetic construct
WSPAAQWERWKFPER

SEQ ID NO: 19882 - protein, 15 aa, synthetic construct
WSPAGTMATSPAPRR

SEQ ID NO: 19883 - protein, 15 aa, synthetic construct
WSPAIMPPWMEPRIS

SEQ ID NO: 19884 - protein, 15 aa, synthetic construct
WSPKRRPEPGRRGGA

SEQ ID NO: 19885 - protein, 15 aa, synthetic construct
WSPRETARCSGAPFP

SEQ ID NO: 19886 - protein, 13 aa, synthetic construct
WSPRPNPSPSRSW

SEQ ID NO: 19887 - protein, 15 aa, synthetic construct
WSPRTKTPRRRRRRR

SEQ ID NO: 19888 - protein, 14 aa, synthetic construct
WSPRWSRRLWRRES

SEQ ID NO: 19889 - protein, 15 aa, synthetic construct
WSPSKGSVWPTRSTA

SEQ ID NO: 19890 - protein, 15 aa, synthetic construct
WSPSRASQLSPAPGS

SEQ ID NO: 19891 - protein, 15 aa, synthetic construct
WSPSVAPLLLSGPET

SEQ ID NO: 19892 - protein, 15 aa, synthetic construct
WSQGPAAEILLVRRG

SEQ ID NO: 19893 - protein, 15 aa, synthetic construct
WSQLRQPPTPPPASQ

SEQ ID NO: 19894 - protein, 15 aa, synthetic construct
WSQSRAQPPIAPRPG

SEQ ID NO: 19895 - protein, 15 aa, synthetic construct
WSRARLQPQAPAAAE

SEQ ID NO: 19896 - protein, 15 aa, synthetic construct
WSRLGGGPGPRRTFW

SEQ ID NO: 19897 - protein, 15 aa, synthetic construct
WSRLPVDDRPASCGS

SEQ ID NO: 19898 - protein, 15 aa, synthetic construct
WSRPAAFRMSRSRTP

SEQ ID NO: 19899 - protein, 15 aa, synthetic construct
WSRPAASGRPRADPG

SEQ ID NO: 19900 - protein, 15 aa, synthetic construct
WSRPSGRESESPRSR

SEQ ID NO: 19901 - protein, 14 aa, synthetic construct
WSRPTSTRRSRGPR

SEQ ID NO: 19902 - protein, 15 aa, synthetic construct
WSSAASPTSSRAAAP

SEQ ID NO: 19903 - protein, 15 aa, synthetic construct
WSSGCCSAGLRWPQL

SEQ ID NO: 19904 - protein, 15 aa, synthetic construct
WSSGGCCCPAAEPCS

SEQ ID NO: 19905 - protein, 15 aa, synthetic construct
WSSGGPTSSSASSPS

SEQ ID NO: 19906 - protein, 15 aa, synthetic construct
WSSGGSAAAGSSIAR

SEQ ID NO: 19907 - protein, 15 aa, synthetic construct
WSSGPEAGGCYVRPQ

SEQ ID NO: 19908 - protein, 15 aa, synthetic construct
WSSLRRPEEPRRRCP

SEQ ID NO: 19909 - protein, 15 aa, synthetic construct
WSSPGRRRREREAAA

SEQ ID NO: 19910 - protein, 15 aa, synthetic construct
WSSRPRTSGCRRRWS

SEQ ID NO: 19911 - protein, 15 aa, synthetic construct
WSSRQPAPASPCCGA

SEQ ID NO: 19912 - protein, 15 aa, synthetic construct
WSSRRPPSPNSPLGP

SEQ ID NO: 19913 - protein, 15 aa, synthetic construct
WSSSPRSSGCGIASP

SEQ ID NO: 19914 - protein, 15 aa, synthetic construct
WSTAHSSPSPGSGPG

SEQ ID NO: 19915 - protein, 15 aa, synthetic construct
WSTDSRGPRPWEGSQ

SEQ ID NO: 19916 - protein, 15 aa, synthetic construct
WSTLPSPGDGNGDGG

SEQ ID NO: 19917 - protein, 15 aa, synthetic construct
WSVRAVPRTAPAPGA

SEQ ID NO: 19918 - protein, 15 aa, synthetic construct
WSVTTLSSAPRISAT

SEQ ID NO: 19919 - protein, 15 aa, synthetic construct
WSWRPCAAGGSSSPS

SEQ ID NO: 19920 - protein, 13 aa, synthetic construct
WTAGCGGPTSSAC

SEQ ID NO: 19921 - protein, 13 aa, synthetic construct
WTAMAAAETSPAR

SEQ ID NO: 19922 - protein, 15 aa, synthetic construct
WTAMGTEWWTSASCR

SEQ ID NO: 19923 - protein, 12 aa, synthetic construct
WTAVDPSAAPSA

SEQ ID NO: 19924 - protein, 15 aa, synthetic construct
WTCGRCRGCRGCCGC

SEQ ID NO: 19925 - protein, 15 aa, synthetic construct
WTFHQALNWDFILLH

SEQ ID NO: 19926 - protein, 15 aa, synthetic construct
WTFPDPDGACGGGSS

SEQ ID NO: 19927 - protein, 15 aa, synthetic construct
WTFRPPGPRRRGPRS

SEQ ID NO: 19928 - protein, 15 aa, synthetic construct
WTGRRRRRRRAARAA

SEQ ID NO: 19929 - protein, 15 aa, synthetic construct
WTGTTPAPASGTRSA

SEQ ID NO: 19930 - protein, 15 aa, synthetic construct
WTGWVAEKGPGEVIT

SEQ ID NO: 19931 - protein, 15 aa, synthetic construct
WTKRIGGSCGGAGCG

SEQ ID NO: 19932 - protein, 15 aa, synthetic construct
WTLLGTSMTRGWGTW

SEQ ID NO: 19933 - protein, 15 aa, synthetic construct
WTMPTSRPPTKVERQ

SEQ ID NO: 19934 - protein, 14 aa, synthetic construct
WTPCAVPGSSAPSS

SEQ ID NO: 19935 - protein, 15 aa, synthetic construct
WTPPGSVCSCPCLCC

SEQ ID NO: 19936 - protein, 15 aa, synthetic construct
WTPREPSRTRSAPSK

SEQ ID NO: 19937 - protein, 15 aa, synthetic construct
WTPSTEISFGTWTIT

SEQ ID NO: 19938 - protein, 15 aa, synthetic construct
WTQGCSKHSTEWPLL

SEQ ID NO: 19939 - protein, 15 aa, synthetic construct
WTQQAPGPCPAPCGH

SEQ ID NO: 19940 - protein, 15 aa, synthetic construct
WTQRMSPAGADVLRS

SEQ ID NO: 19941 - protein, 15 aa, synthetic construct
WTQRRAAAARRTTAW

SEQ ID NO: 19942 - protein, 15 aa, synthetic construct
WTRPAPVSACPGSTS

SEQ ID NO: 19943 - protein, 15 aa, synthetic construct
WTSAPPCTTPPVMAS

SEQ ID NO: 19944 - protein, 15 aa, synthetic construct
WTSFGGTQPGDSASC

SEQ ID NO: 19945 - protein, 15 aa, synthetic construct
WTSGLGRGSLQWRRA

SEQ ID NO: 19946 - protein, 15 aa, synthetic construct
WTSPSAAETSAACSW

SEQ ID NO: 19947 - protein, 15 aa, synthetic construct
WTSRKAPVRAACNLL

SEQ ID NO: 19948 - protein, 14 aa, synthetic construct
WTSRQLPNKLPKKF

SEQ ID NO: 19949 - protein, 15 aa, synthetic construct
WTSTALETRVPSHQK

SEQ ID NO: 19950 - protein, 15 aa, synthetic construct
WTTRRSPRSWTSGSS

SEQ ID NO: 19951 - protein, 14 aa, synthetic construct
WTTRTPTPCRPQRP

SEQ ID NO: 19952 - protein, 15 aa, synthetic construct
WTWAPGTRQEGDRSR

SEQ ID NO: 19953 - protein, 14 aa, synthetic construct
WVAPAGQARTERTL

SEQ ID NO: 19954 - protein, 14 aa, synthetic construct
WVATGEQSPRGMNW

SEQ ID NO: 19955 - protein, 15 aa, synthetic construct
WVATVGRLAATSINP

SEQ ID NO: 19956 - protein, 15 aa, synthetic construct
WVEEITQMCLTSSLR

SEQ ID NO: 19957 - protein, 15 aa, synthetic construct
WVGQKGAGSRGGGGS

SEQ ID NO: 19958 - protein, 15 aa, synthetic construct
WVKLWEILLLTQKAI

SEQ ID NO: 19959 - protein, 15 aa, synthetic construct
WVPPLAPLPTVLPGI

SEQ ID NO: 19960 - protein, 15 aa, synthetic construct
WVPRSHGSDSSATRR

SEQ ID NO: 19961 - protein, 15 aa, synthetic construct
WVPRWGQARGWLPGR

SEQ ID NO: 19962 - protein, 15 aa, synthetic construct
WVPRWPHQPPAAEAA

SEQ ID NO: 19963 - protein, 15 aa, synthetic construct
WVTRRCCRCCCCSTP

SEQ ID NO: 19964 - protein, 15 aa, synthetic construct
WVTSSCTGATRENSA

SEQ ID NO: 19965 - protein, 15 aa, synthetic construct
WWCSEDPTAAATAHA

SEQ ID NO: 19966 - protein, 15 aa, synthetic construct
WWGDPGGAEQLSGQL

SEQ ID NO: 19967 - protein, 15 aa, synthetic construct
WWPNSGSGWLTRSTA

SEQ ID NO: 19968 - protein, 15 aa, synthetic construct
WWVPRPAPAPAPPWA

SEQ ID NO: 19969 - protein, 15 aa, synthetic construct
WWVRRMPEPAREETP

SEQ ID NO: 19970 - protein, 13 aa, synthetic construct
WYLRKDDEEAAKS

SEQ ID NO: 19971 - protein, 15 aa, synthetic construct
YAASWPGSAWQSFWV

SEQ ID NO: 19972 - protein, 15 aa, synthetic construct
YAELRLPARRDSAVG

SEQ ID NO: 19973 - protein, 15 aa, synthetic construct
YAERLARLVTGVQEE

SEQ ID NO: 19974 - protein, 15 aa, synthetic construct
YAPPRAAALARHQIR

SEQ ID NO: 19975 - protein, 15 aa, synthetic construct
YCARPARLGARRASS

SEQ ID NO: 19976 - protein, 15 aa, synthetic construct
YCGCSRPGGALAWAP

SEQ ID NO: 19977 - protein, 15 aa, synthetic construct
YGASCTTSSWVSKRA

SEQ ID NO: 19978 - protein, 15 aa, synthetic construct
YHLDGQPHWMVGFHP

SEQ ID NO: 19979 - protein, 15 aa, synthetic construct
YHSQPGPAGGGRAAV

SEQ ID NO: 19980 - protein, 15 aa, synthetic construct
YNRQRSTCRPWSSGK

SEQ ID NO: 19981 - protein, 15 aa, synthetic construct
YPAAAGPSAASLCAA

SEQ ID NO: 19982 - protein, 15 aa, synthetic construct
YPAGGGGRREAGRSA

SEQ ID NO: 19983 - protein, 15 aa, synthetic construct
YPFGLRLALQQPDHR

SEQ ID NO: 19984 - protein, 15 aa, synthetic construct
YPGHPQGWPTGEETT

SEQ ID NO: 19985 - protein, 15 aa, synthetic construct
YPHAGAGPGRDAAPG

SEQ ID NO: 19986 - protein, 15 aa, synthetic construct
YQNSCGADCGEPGRL

SEQ ID NO: 19987 - protein, 15 aa, synthetic construct
YRGREGGMVHRLREH

SEQ ID NO: 19988 - protein, 15 aa, synthetic construct
YSHRWVGVEGPPEIS

SEQ ID NO: 19989 - protein, 15 aa, synthetic construct
YSIMKSWSCRPASPE

SEQ ID NO: 19990 - protein, 15 aa, synthetic construct
YSPPPEEAMPFEAEQ

SEQ ID NO: 19991 - protein, 15 aa, synthetic construct
YSPPPEEAMPFEFDQ

SEQ ID NO: 19992 - protein, 15 aa, synthetic construct
YTACSARATTPSESG

SEQ ID NO: 19993 - protein, 15 aa, synthetic construct
YTGCCGRATTPSALA

SEQ ID NO: 19994 - protein, 15 aa, synthetic construct
YTPGRRAPGRPAPAP

SEQ ID NO: 19995 - protein, 15 aa, synthetic construct
YVAPAKAGAPSEPCQ

SEQ ID NO: 19996 - protein, 15 aa, synthetic construct
YVHPPPPGTPGRLPE

SEQ ID NO: 19997 - protein, 15 aa, synthetic construct
YVRPRRGRAVRGWRR

What is claimed is:

1. An array comprising frameshift peptides (FSPs) resulting from exon 1 mis-initiation of translation.

2. The array of claim 1, wherein the FSPs on the array are spaced between 3 and 9 μm.

3. The array of claim 1, wherein the FSPs comprise one or more peptides as set forth in any one of SEQ ID NOs: 1-19,997.

4. The array of claim 1, wherein the array comprises at least about 2500, about 5000, about 7500, about 10000, about 12500, about 15000, about 17500, about 20000, about 22500, about 25000, about 27500, about 30000, about 32500, about 35000, about 37500, about 40000, about 50000, about 100000, about 200000, about 300000, or about 400000 FSPs.

5. A vaccine composition comprising frameshift peptides (FSPs) resulting from exon 1 mis-initiation of translation.

6. The vaccine composition of claim 5, further comprising an adjuvant.

7. The vaccine composition of claim 6, wherein the adjuvant is ABM2, AS01B, AS02, AS02A, Adjumer, Adjuvax, Algammulin, Alum, Aluminum phosphate, Aluminum potassium sulfate, Bordetella pertussis, Calcitriol, Chitosan, Cholera toxin, CpG, Dibutyl phthalate, Dimethyldioctadecylammonium bromide (DDA), Freund's adjuvant, Freund's complete, Freund's incomplete (IFA), GM-CSF, GMDP, Gamma Inulin, Glycerol, HBSS (Hank's Balanced Salt Solution), Hiltonol, IL-12, IL-2, Imiquimod, Interferon-Gamma, ISCOM, Lipid Core Peptide (LCP), Lipofectin, Lipopolysaccharide (LPS), Liposomes, MF59, MLP+TDM, Monophosphoryl lipid A, Montanide IMS-1313, Montanide ISA 206, Montanide ISA 720, Montanide ISA-51, Montanide ISA-50, nor-MDP, Oil-in-water emulsion, P1005 (non-ionic copolymer), Pam3Cys (lipoprotein), Pertussis toxin, Poloxamer, QS21, RaLPS, Ribi, Saponin, Seppic ISA 720, Soybean Oil, Squalene, Syntex Adjuvant Formulation (SAF), Synthetic polynucleotides (poly IC/poly AU), TiterMax Tomatine, Vaxfectin, XtendIII, or Zymosan.

8. A method of detecting cancer in a subject, the method comprising:
contacting a biological sample from the subject to an array comprising frameshift peptides (FSPs) resulting from exon 1 mis-initiation of translation; and
measuring antibody reactivity to the FSPs resulting from mis-initiation of translation in tumors.

9. The method of claim 8, wherein the FSPs comprise one or more peptides as set forth in any one of SEQ ID NOs: 1-19,997.

10. The method of claim 8, wherein the FSPs are fixed on a substrate.

11. The method of claim 10, wherein the substrate comprises glass, silica, composite, resin, or combination thereof.

12. The method of claim 8, wherein the array is configured to detect binding by at least one of fluorescence, luminescence, calorimetry, chromatography, radioactivity, Bio-Layer Interferometry, and surface plasmon resonance.

13. The method of claim 8, wherein the array comprises at least about 2500, about 5000, about 7500, about 10000, about 12500, about 15000, about 17500, about 20000, about 22500, about 25000, about 27500, about 30000, about 32500, about 35000, about 37500, about 40000, about 50000, about 100000, about 200000, about 300000, or about 400000 FSPs.

14. The method of claim 8, wherein the biological sample comprises blood, serum, plasma, cerebrospinal fluid, saliva, urine, or combinations thereof.

15. The method of claim 8, wherein the biological sample comprises an antibody.

16. The method of claim 8, wherein the subject is a mammal.

17. A method of treating or preventing cancer, comprising administering a composition comprising: a therapeutic molecule designed to bind frameshift peptides (FSPs) resulting from exon 1 mis-initiation of translation, or FSPs resulting from exon 1 mis-initiation of translation.

18. The method of claim 17, wherein the FSPs comprise one or more peptides as set forth in SEQ ID NOs: 1-19,997.

19. A method of predicting response to an immunotherapy, comprising measuring antibody reactivity to one or more frameshift peptides (FSPs) resulting from exon 1 mis-initiation of translation.

20. The method of claim 19, wherein the one or more FSPs comprise one or more peptides as set forth in any one of SEQ ID NOs: 1-19,997.
